(19) United States
(12) Patent Application Publication
(10) Pub. No.: US 2016/0046682 A1
(43) Pub. Date: Feb. 18, 2016

(54) ARTIFICIAL TRANSCRIPTION FACTORS ENGINEERED TO OVERCOME ENDOSOMAL ENTRAPMENT

(71) Applicant: ALIOPHTHA AG, Basel (CH)

(72) Inventors: Albert NEUTZNER, Schliengen (DE); Josef FLAMMER, Binningen (CH); Alice HUXLEY, Binningen (CH)

(73) Assignee: ALIOPHTHA AG, Basel (CH)

(21) Appl. No.: 14/781,701

(22) PCT Filed: Apr. 2, 2014
(86) PCT No.: PCT/EP2014/056589

§ 371 Date: Oct. 1, 2015

(30) Foreign Application Priority Data
Apr. 3, 2013 (EP) 13162197.1

(51) Int. Cl. C07K 14/47

(52) U.S. Cl. CPC C07K 14/4702

(57) ABSTRACT

The invention relates to an artificial transcription factor comprising a polydactyl zinc finger protein targeting specifically a gene promoter, engineered to overcome endosomal entrapment after transduction into cells. Such artificial transcription factor comprises a polydactyl zinc finger protein fused to an inhibitory or activatory protein domain, a nuclear localization sequence, a protein transduction domain, and an endosome-specific protease-recognition site. These transducible artificial transcription factors are particularly useful for the treatment of diseases caused or modulated by membrane-bound receptor proteins, nuclear receptor proteins or products of haploinsufficient genes.

### FIELD OF THE INVENTION

[0001] The invention relates to an artificial transcription factor comprising a polydactyl zinc finger protein targeting specifically a gene promoter and a protein transduction domain engineered to overcome endosomal entrapment after transduction into cells.

### BACKGROUND OF THE INVENTION

[0002] Artificial transcription factors are proposed to be useful tools for modulating gene expression (Sera T., 2009, Adv Drug Deliv Rev 61, 513-526). Many naturally occurring transcription factors, influencing gene expression either through repression or activation of gene transcription, possess complex specific domains for the recognition of a certain DNA sequence. This makes them unattractive targets for manipulation if one intends to modify their specificity and target gene(s). However, a certain class of transcription factors contains several so called zinc finger (ZF) domains, which are modular and therefore lend themselves to genetic engineering. Zinc fingers are short (30 amino acids) DNA binding motifs targeting almost independently three DNA base pairs. A protein containing several such zinc fingers fused together is thus able to recognize longer DNA sequences. A hexameric zinc finger protein (ZFP) recognizes an 18 base pairs (bp) DNA target, which is almost unique in the entire human genome. Initially thought to be completely context independent, more in-depth analyses revealed some context specificity for zinc fingers (Klug A., 2010, Annu Rev Biochem 79, 213-231). Mutating certain amino acids in the zinc finger recognition surface altering the binding specificity of ZF modules resulted in defined ZF building blocks for most of 5′-GNN-3′, 5′-CNN-3′, 5′-ANN-3′, and some 5′-TNN-3′ codons (e.g. so-called Barbas modules, see Dreier B., Barbas C. F. 3^{rd} et al., 2005, J Biol Chem 280, 35588-35597). While early work on artificial transcription factors concentrated on a rational design based on combining preselected zinc fingers with a known 3 bp target sequence, the realization of a certain context specificity of zinc fingers necessitated the generation of large zinc finger libraries which are interrogated using sophisticated methods such as bacterial or yeast one hybrid, phage display, compartmentalized ribosome display or in vivo selection using FACS analysis.

[0003] Using such artificial zinc finger proteins, DNA loci within the human genome can be targeted with high specificity. Thus, these zinc finger proteins are ideal tools to transport protein domains with transcription-modulatory activity to specific promoter sequences resulting in the modulation of expression of a gene of interest. Suitable domains for the silencing of transcription are the Krueppel-associated domain (KRAB) as N-Terminal (SEQ ID NO: 1) or C-terminal (SEQ ID NO: 2) KRAB domain, the Sin3-interacting domain (SID, SEQ ID NO: 3) and the ERF repressor domain (ERD, SEQ ID NO: 4), while activation of gene transcription is achieved through herpes virus simplex VP16 (SEQ ID NO: 5) or VP64 (tetrameric repeat of VP16, SEQ ID NO: 6) domains (Beerli R. R. et al., 1998, Proc Natl Acad Sci USA 95, 14628-14633). Additional domains considered to confer transcriptional activation are CJ7 (SEQ ID NO: 7), p65-TA1 (SEQ ID NO: 8), SAD (SEQ ID NO: 9), NF-1 (SEQ ID NO: 10), AP-2 (SEQ ID NO: 11), SP1-A (SEQ ID NO: 12), SP1-B (SEQ ID NO: 13), Oct-1 (SEQ ID NO: 14), Oct-2 (SEQ ID NO: 15), Oct-2_{—}5 x (SEQ ID NO: 16), MTF-1 (SEQ ID NO: 17), BTEB-2 (SEQ ID NO: 18) and LKLF (SEQ ID NO: 19). In addition, transcriptionally active domains of proteins defined by gene ontology GO: 0001071 (http://amigo.geneontology.org/cgi-bin/amigo/term_details?term=GO:0001071) are considered to achieve transcriptional regulation of target proteins. Fusion proteins comprising engineered zinc finger proteins as well as regulatory domains are referred to as artificial transcription factors.

[0004] While small molecule drugs are not always able to selectively target a certain member of a given protein family due to the high conservation of specific features, biologicals offer great specificity as shown for antibody-based novel drugs. However, virtually all biologicals to date act extracellularly. Especially above mentioned artificial transcription factors would be suitable to influence gene transcription in a therapeutically useful way. However, the delivery of such factors to the site of action—the nucleus—is not easily achieved, thus hampering the usefulness of therapeutic artificial transcription factor approaches, e.g. by relaying on retroviral delivery with all the drawbacks of this method such as immunogenicity and the potential for cellular transformation (Lund C. V. et al., 2005, Mol Cell Biol 25, 9082-9091).

[0005] So called protein transduction domains (PTDs) were shown to promote protein translocation across the plasma membrane into the cytosol/nucleoplasm. Short peptides such as the HIV derived TAT peptide (SEQ ID NO: 20), mT02 (SEQ ID NO: 21), mTO3 (SEQ ID NO: 22), R9 (SEQ ID NO: 23), ANTP (SEQ ID NO: 24) and others were shown to induce a cell-type independent macropinocytotic uptake when fused to cargo proteins (Wadia J. S. et al., 2004, Nat Med 10, 310-315). Upon arrival in the cytosol, such fusion proteins were shown to have biological activity. Interestingly, even misfolded proteins can become functional following protein transduction most likely through the action of intracellular chaperones. However, a major hurdle for the use of protein transduction domains for delivering therapeutic cargo to cells is the limited escape of such proteins from the endosomal compartment to other subcellular localization such as the nucleus (Koren E and Torchilin V. P., 2012, Trends in Mol Med 18, 385-393). The need to increase the endosomal escape of cargo proteins following protein transduction is long recognized, and two major approaches to enhance endosomal escape are used: First, co-delivery of so called fusogenic peptides such as HA2 (SEQ ID NO: 25), KALA (SEQ ID NO: 26) or GALA (SEQ ID NO: 27) was shown to increase protein transduction into the cytosol of cells. Once inside the endosome, these peptides are capable of interacting with the endosomal membrane leading to the rupture of these vesicles liberating their contents. Second, lysosomotropic agents such as chloroquine known to disrupt the endosomal compartment were shown to increase escape of cargo proteins from endosomes. Other approaches to increase endosomal escape involve fusogenic lipids and membrane-disruptive polymers such as PEI (El-Sayed A. et al., 2009, AAPS J 11, 13-22). So far, all approaches to increase endosomal escape of cargo proteins following protein transduction involve an agent capable of disrupting the endosomal membrane.

[0006] A large percentage of all known drug targets are receptor molecules that are either stimulated or blocked by the action of small molecule drugs with oftentimes considerable off-target activities. Examples for such receptors are the histamine H1 receptor or alpha- and beta-adrenoreceptors, but in general proteins defined by gene ontology GO:0004888 and GO:0004930.

[0007] The vasoactive endothelin system plays an important role in the pathogenesis of various diseases. Endothelins, on the one hand, are involved in the regulation of blood supply and, on the other hand, are main players in the cascade of events induced by hypoxia. Endothelin is e. g. involved in the breakdown of the blood-brain or the blood-retina barrier and in the neovascularisation. Endothelin is furthermore involved in neurodegeneration but also the regulation of the threshold of pain sensation or even thirst feeling. Endothelin is also involved in regulation of intraocular pressure.

[0008] The action of endothelin is mediated by its cognate receptors, mainly endothelin receptor A, usually located on smooth muscle cells surrounding blood vessels. Influencing the endothelin system—systemically or locally—is of interest for the treatment of many diseases such as subarachnoidal or brain hemorrhages. Endothelin also influences the course of multiple sclerosis. Endothelin contributes to (pulmonary) hypertension, but also to arterial hypotension, cardiomyopathy and to Raynaud syndrome, variant angina and other cardiovascular diseases. Endothelin is involved in diabetic nephropathy and diabetic retinopathy. In the eye it further plays a role for the glaucomatous neurodegeneration, retinal vein occlusion, giant cell arthritis, retinitis pigmentosa, age related macula degeneration, central serous chorioretinopathy, Morbus Leber, Susac syndrome, intraocular hemorrhages, epiretinal gliosis and certain other pathological conditions.

[0009] The eye is an exquisite organ that strongly relies on a balanced and sufficient perfusion to meet its high oxygen demand. Failure to provide sufficient and stable oxygen supply causes ischemia-reperfusion injury leading to glial activation and neuronal damage as observed in glaucoma patients with progressing disease despite normal or normalized intraocular pressure. Insufficient blood supply also leads to hypoxia causing run-away neovascularization with the potential of further retinal damage as evident during diabetic retinopathy or wet age related macular degeneration. Eye tissue perfusion is under complex control and depends on blood pressure, intraocular pressure as well as local factors modulating vessel diameter. Such local factors are for example the mentioned endothelins, short peptides with a strong vasoconstrictive activity. Three isoforms of endothelins (ET-1, ET-2, and ET-3) are produced by endothelin converting enzyme from precursor molecules secreted by endothelial cells localized in the blood vessel wall. Two cognate receptors for mature ET are known, ETRA and ETRB. While ETRA is localized to smooth muscle cells forming vessels walls and promoting vasoconstriction, ETRB is mainly expressed on endothelial cells and acts vasodilatatory by promoting the release of nitric oxide, thus causing smooth muscle relaxation. ETRA and ETRB belong to the large class of G-protein coupled seven transmembrane helix receptors. The binding of ET to ETRA or ETRB results in G protein activation, thus triggering an increase in intracellular calcium concentration and thereby causing a wide array of cellular reactions.

[0010] Influencing the ET system pharmacologically might prove useful in cases, wherein ET levels are elevated and ETs act in a detrimental fashion, such as during retinal vein occlusion, glaucomatous neurodegeneration, retinitis pigmentosa, giant cell arteritis, central serous chorioretinopathy, multiple sclerosis, optic neuritis, rheumatoid arthritis, Susac syndrome, radiation retinopathy, epiretinal gliosis, fibromyalgia and diabetic retinopathy. To this end, down-regulation of ETRA will aid to modulate disease outcome. But under certain circumstances, upregulation of ETRA and therefore an increased sensitivity towards ET might be desirable, for example to promote corneal wound healing during the recovery from corneal trauma or corneal ulcer.

[0011] ETRB-mediated signaling is connected to pathophysiological processes e.g. during cancer stem cell maintenance and tumor growth. In addition, upregulation of ETRB is associated with glaucomatous neurodegeneration while inhibition of ETRB was shown to act neuroprotective during glaucoma. Furthermore, ETRB is upregulated during inflammation.

[0012] Bacterial cell wall components such as lipopolysaccharide (LPS) play important roles in the pathogenesis of various diseases. The presence of LPS in the body points to a bacterial infection that needs to be addressed by the immune system. Since LPS is a general component of Gram-negative bacteria, LPS constitutes a so called danger signal that can activate the immune system. LPS is recognized by the Toll-like receptor 4 (TLR4), a member of the larger family of Toll-like receptors involved in the recognition of varied danger signals or pathogen associated molecular patterns (PAMPs) associated with bacterial or viral infections. While recognition of LPS as danger signal is an important part of innate immunity, overstimulation or prolonged stimulation of the TLR4 receptor is connected to a variety of pathological conditions associated with chronic inflammation. Examples are various liver diseases such as alcoholic liver disease, nonalcoholic fatty liver disease, nonalcoholic steatohepatitis, chronic hepatitis B or C virus (HCV) infection, and HIV-HCV co-infection. Other diseases associated with TLR4 signaling are rheumatoid arthritis, artherosclerosis, psoriasis, Crohn's disease, uveitis, contact lens associated keratitis and corneal inflammation. In addition, TLR4-mediated signaling is involved in cancer progression and resistance to chemotherapy.

[0013] Immunoglobulins isotype E (IgE) are part of the adaptive immune system and as such involved in the protection against infections but also neoplastic transformation. IgE is bound by the high-affinity IgE receptor (FCER1) localized on mast cells and basophiles. Binding of IgE to FCER1 followed by cross-linking these complexes via specific antigens called allergens leads to the release of various factors from mast cells and basophils causing the allergic response. Among these factors are histamine, leukotrienes, various cytokines but also lysozyme, tryptase or β-hexosaminidase. The release of these factors is associated with allergic diseases such as allergic rhinitis, asthma, eczema and anaphylaxis.

[0014] Nuclear receptors are a protein superfamily of ligand-activated transcription factors. They are, unlike most other cellular receptors, soluble proteins localized to the cytosol or the nucleoplasm. Ligands for nuclear receptors are lipophilic molecules, among them steroid and thyroid hormones, fatty and bile acids, retinoic acid, vitamin D3 and prostaglandins (McEwan I. J., Methods in Molecular Biology: The Nuclear Receptor Superfamily, 505, 3-17). Upon ligand binding, nuclear receptors dimerize, thus triggering binding to specific transcription-factor-specific DNA response elements inside ligand-responsive gene promoters causing either activation or repression of gene expression. Given that nuclear receptors are responsible for mediating the activity of many broad-acting hormones such as steroids and important metabolites, the miss- and dysfunction of nuclear receptors is involved in the natural history of many diseases.

[0015] Using agonists or antagonists to modulate the activity of nuclear receptors is employed for therapeutic purposes. Modulation of glucocorticoid receptor (NR3C1) function using corticosteroids such as agonistic dexamethasone is common clinical practice for influencing inflammatory diseases. Another modulation of nuclear receptor activity is exemplified in oral contraception, wherein activation of the estrogen receptor (ESR1/ER) and the progesterone receptor is used to prevent egg fertilization in women. In another example, blocking the androgen receptor (AR) using anti-androgens such as flutamide or bicalutamide proved useful for the treatment of AR-dependent prostate cancers. Furthermore, blockage of the estrogen receptor by blocking estrogen synthesis and thus the availability of estrogen is a standard treatment for breast cancer in women or gynaecomastia in men.

[0016] Genetic mutations are at the heart of many inherited disorders. In general, such mutations can be classified into dominant or recessive regarding their mode of inheritance, with a dominant mutation being able to cause the disease phenotype even when only one gene copy—be it the maternal or the paternal—is affected, while for a recessive mutation to cause disease both, maternal and paternal, gene copies need to be mutated. Dominant mutations are able to cause disease by one of two general mechanisms, either by dominant-negative action or by haploinsufficiency. In case of a dominant-negative mutation, the gene product gains a new, abnormal function that is toxic and causes the disease phenotype. Examples are subunits of multimeric protein complexes that upon mutation prevent proper function of said protein complex. Diseases inherited in a dominant fashion can also be caused by haploinsufficiency, wherein the disease-causing mutation inactivates the affected gene, thus lowering the effective gene dose. Under these circumstances, the second, intact gene copy is unable to provide sufficient gene product for normal function. About 12'000 human genes are estimated to be haploinsufficient (Huang et al., 2010, PLoS Genet. 6(10), e1001154) with about 300 genes known to be associated with disease.

[0017] Neuronal survival critically depends on mitochondrial function with mitochondrial failure at the heart of many neurodegenerative disorders (Karbowski M., Neutzner A., 2012, Acta Neuropathol 123(2), 157-71). Besides their essential function in providing energy in form of ATP, mitochondria are critically involved in calcium buffering, diverse catabolic as well as metabolic processes and also programmed cell death. This important function of mitochondria is mirrored in the many cellular mechanisms in place to maintain mitochondria and to prevent mitochondrial failure and subsequently cell death (Neutzner A. et al., 2012, Semin Cell Dev Biol 23, 499-508). A central role among these processes plays the maintenance of a dynamic mitochondrial network with a balanced mitochondrial morphology. This is achieved by the so called mitochondrial morphogens that promote either fission of mitochondria in the case of Drp1, Fis1, Mff, MiD49 and MiD51—or fusion of mitochondrial tubules in the case of Mfn1, Mfn2 and OPA1. Balancing mitochondrial morphology is essential since loss of mitochondrial fusion is known to promote the loss of ATP production and sensitizes cells to apoptotic stimuli connecting this process to neuronal cell death associated with neurodegenerative disorders.

[0018] A key player in the process of mitochondrial fusion is optic atrophy 1 or OPA1. OPA1 is a large GTPase encoded by the OPA1 gene and essential for mitochondrial fusion. In addition, OPA1 plays an important role in maintaining internal, mitochondrial structure as component of the cristae. It was shown that downregulation of OPA1 gene expression causes mitochondrial fragmentation due to a loss of fusion and sensitizes cells to apoptotic stimuli. Mutations in OPA1 were identified to be responsible for about 70% of Kjer's optic neuropathy or autosomal dominant atrophy (ADOA). In most populations, ADOA is prevalent between 1/10'000 and 3/100'000 and is characterized by a slowly progressing decrease in vision starting in early childhood. The visual impairment ranges from mild to legally blind, is irreversible and is caused by the slow degeneration of the retinal ganglion cells (RGCs). In most cases, ADOA is non-syndromic, however, in about 15% of patients extra-ocular, neuro-muscular manifestations such as sensori-neural hearing loss are encountered. Until now, no viable treatment for this disease is available. Interestingly, certain OPA1 alleles were connected to normal tension, but not high tension glaucoma, highlighting again the importance of OPA1 for maintaining normal mitochondrial physiology.

### SUMMARY OF THE INVENTION

[0019] The invention relates to an artificial transcription factor comprising a polydactyl zinc finger protein targeting specifically a gene promoter fused to an inhibitory or activatory protein domain, a nuclear localization sequence, a protein transduction domain, and an endosome-specific protease recognition site, and to pharmaceutical compositions comprising such an artificial transcription factor. Furthermore the invention relates to the use of such artificial transcription factors for modulating the expression of genes, and in treating diseases wherein modulation of such gene expression is beneficial.

[0020] In a particular embodiment, the gene promoter targeted by the artificial transcription factors of the invention is a receptor gene promoter.

[0021] In another particular embodiment, the gene promoter targeted by the artificial transcription factors of the invention is a nuclear receptor gene promoter.

[0022] In another particular embodiment, the gene promoter targeted by the artificial transcription factors of the invention is a haploinsufficient gene promoter.

[0023] In a particular embodiment, the endosome-specific protease recognition site is a cathepsin recognition site, preferably a cathepsin B recognition site, for example the cathepsin B recognition site contained in the cathepsin B in vitro substrate prorenin (QPMKRLTLGN, SEQ ID NO: 28).

[0024] In another particular embodiment the invention relates to an artificial transcription factor variant comprising a polydactyl zinc finger protein targeting specifically a gene promoter fused to an inhibitory or activatory protein domain, a nuclear localization sequence, and an endosome-specific protease recognition site.

[0025] In a particular embodiment, the receptor gene promoter is the endothelin receptor A promoter (SEQ ID NO: 29). In another particular embodiment the invention relates to such an artificial transcription factor for use in influencing the cellular response to endothelin, for lowering or increasing endothelin receptor A levels, and for use in the treatment of diseases modulated by endothelin, in particular for use in the treatment of such eye diseases. Likewise the invention relates to a method of treating a disease modulated by endothelin comprising administering a therapeutically effective amount of an artificial transcription factor of the invention to a patient in need thereof.

[0026] In another particular embodiment, the receptor gene promoter is the endothelin receptor B promoter (SEQ ID NO: 30). In another particular embodiment the invention relates to such an artificial transcription factor for use in influencing the cellular response to endothelin, for lowering or increasing endothelin receptor B levels, and for use in the treatment of diseases modulated by endothelin, in particular for use in the treatment of such eye diseases. Likewise the invention relates to a method of treating a disease modulated by endothelin comprising administering a therapeutically effective amount of an artificial transcription factor of the invention to a patient in need thereof.

[0027] In another particular embodiment, the receptor gene promoter is the Toll-like receptor 4 promoter (SEQ ID NO: 31). In another particular embodiment the invention relates to such an artificial transcription factor for use in influencing the cellular response to lipopolysaccharide, for lowering or increasing Toll-like receptor 4 levels, and for use in the treatment of diseases modulated by lipopolysaccharide, in particular for use in the treatment of eye diseases. Likewise the invention relates to a method of treating a disease modulated by lipopolysaccharide comprising administering a therapeutically effective amount of an artificial transcription factor of the invention to a patient in need thereof.

[0028] In another particular embodiment, the receptor gene promoter is the high-affinity immunoglobulin epsilon receptor subunit alpha (FcER1A) promoter (SEQ ID NO: 32). In another particular embodiment the invention relates to such an artificial transcription factor for use in influencing the cellular response to immunoglobulin E (IgE), for lowering or increasing high-affinity IgE receptor levels, and for use in the treatment of diseases modulated by IgE, in particular for use in the treatment of eye diseases. Likewise the invention relates to a method of treating a disease modulated by IgE comprising administering a therapeutically effective amount of an artificial transcription factor of the invention to a patient in need thereof.

[0029] In another particular embodiment, the promoter region of the nuclear receptor gene is the glucocorticoid receptor promoter (SEQ ID NO: 33). In this particular embodiment the invention relates to an artificial transcription factor targeting the glucocorticoid receptor promoter for use in influencing the cellular response to glucocorticoids, for lowering or increasing glucocorticoid receptor levels, and for use in the treatment of diseases modulated by glucocorticoids, in particular for use in the treatment of eye diseases modulated by glucocorticoids. Likewise the invention relates to a method of treating a disease modulated by glucocorticoids comprising administering a therapeutically effective amount of an artificial transcription factor of the invention targeting the glucocorticoid receptor promoter to a patient in need thereof.

[0030] In another particular embodiment, the promoter region of the nuclear receptor gene is the androgen receptor promoter (SEQ ID NO: 34). In this particular embodiment the invention relates to an artificial transcription factor targeting the androgen receptor promoter for use in influencing the cellular response to testosterone, for lowering or increasing androgen receptor levels, and for use in the treatment of diseases modulated by testosterone. Likewise the invention relates to a method of treating a disease modulated by testosterone comprising administering a therapeutically effective amount of an artificial transcription factor of the invention targeting the androgen receptor promoter to a patient in need thereof.

[0031] In another particular embodiment, the promoter region of the nuclear receptor gene is the estrogen receptor promoter (SEQ ID NO: 35). In this particular embodiment the invention relates to such an artificial transcription factor targeting the estrogen receptor promoter for use in influencing the cellular response to estrogen, for lowering or increasing estrogen receptor levels, and for use in the treatment of diseases modulated by estrogen. Likewise the invention relates to a method of treating a disease modulated by estrogen comprising administering a therapeutically effective amount of an artificial transcription factor of the invention targeting the estrogen receptor promoter to a patient in need thereof.

[0032] Furthermore the invention relates to the use of such artificial transcription factors for increasing the expression from haploinsufficient gene promoters, and in treating diseases caused or influenced by such haploinsufficient gene promoters. Likewise the invention relates to a method of treating a disease caused or modulated by haploinsufficiency comprising administering a therapeutically effective amount of an artificial transcription factor of the invention targeting a haploinsufficient gene promoter to a patient in need thereof.

[0033] In a particular embodiment, the haploinsufficient gene promoter is the OPA1 promoter (SEQ ID NO: 36). In this particular embodiment the invention relates to an artificial transcription factor for use in enhancing the expression of the OPA1 gene, and for use in the treatment of diseases caused or modified by low OPA1 levels, in particular for use in the treatment of eye diseases. Likewise the invention relates to a method of treating a disease influenced by OPA1 comprising administering a therapeutically effective amount of an artificial transcription factor of the invention to a patient in need thereof.

[0034] The invention further relates to nucleic acids coding for an artificial transcription factor of the invention, vectors comprising these, and host cells comprising such vectors.

### BRIEF DESCRIPTION OF THE FIGURES

[0035] FIG. 1: Modulating Gene Expression Using Protease-Sensitive Transducible Artificial Transcription Factors

[0036] An artificial transcription factor comprising a protein transduction domain (PTD), an endosome-specific protease cleavage site (PS), a domain with transcription regulating activity (RD), a nuclear localization sequence (NLS), and a polydactyl zinc finger (ZF) protein specific for the promoter region (P) of a gene (G) enters the cell via an endocytotic mechanism. In FIG. 1A such an artificial transcription factor is trapped inside the endosomal compartment (e) unable to reach efficiently the nucleus (n). In FIG. 1B, an endosome-specific protease (symbolized by scissors) is activated during endosomal maturation, recognizes PS and cleaves the artificial transcription factor, thus separating PTD from RD-NLS-ZFₙ. Following rupture of the endosomal vesicle, the now cleaved artificial transcription factor is able to leave the endosomal compartment and is being transported to the nucleus, see FIG. 10. Upon binding to its target site in the promoter region P of gene G, production of mRNA (m) is either up- or downregulated (+ or −), depending on the transcription regulating activity of the regulatory domain RD.

[0037] FIG. 2: Activity of Artificial Transcription Factor Targeting ETRA

[0038] HeLa cells were co-transfected with an expression plasmid for AO74V, an ETRA-specific artificial transcription factor containing a SID domain, and a Gaussia luciferase/SEAP reporter plasmid containing the ETRA promoter (AO74V). Cells expressing YFP instead of AO74V served as control (c). 48 hours post transfection, luciferase activity was measured, normalized to SEAP activity and expressed as relative luciferase activity (RLuA) in percent of control.

[0039] FIG. 3: An ETRA-Specific Artificial Transcription Factor is Capable of Suppressing Expression of the Endogenous ETRA Gene
[0040] (A)+(B) HEK 293 FlpIn TRex cells stably expressing the ETRA-specific artificial transcription factor AO74V targeting ETRA_TS+74 (labeled AO74V) under the control of a tetracycline inducible promoter were treated with tetracycline (tet) for 24 hours or left untreated and ETRA mRNA levels were measured using quantitative RT-PCR. Cells containing stably integrated empty vector (labeled M) or an inactive version of AO74V lacking all cysteine residues involved in zinc complexation (labeled C) served as control. The expression construct was integrated into the FlpIn site (cells in panel A) present in these cells via homologous recombination or via TALEN-mediated double-strand repair into the AAVS1 safe harbor (cells in panel B).
   (C) HeLa cells containing tetracycline-inducible expression constructs for AO74V (labeled AO74V), inactive AO74V (labeled C) or empty vector control (labeled M) in the AAVS1 locus were induced with tetracycline (tet) for 24 hours or left untreated, and ETRA mRNA levels were quantified by RT-PCR. Shown are the average fold changes of three independent experiments of ETRA expression (FC) of tetracycline-induced cells relative to not induced cells. Error bars represent SD.

[0041] FIG. 4: ETRA-Specific Artificial Transcription Factor Blocks ET-1 Dependent Calcium Signaling

[0042] HEK 293 FlpIn TRex cells stably transfected with tetracycline-inducible expression construct for AO74V, an ETRA-specific artificial transcription factor containing a SID domain, were induced with 1 μg/ml tetracycline (B) or left uninduced (A) and treated with 0 (filled circles), 100 (empty circles), or 1000 (triangles) ng/ml ET-1. Calcium flux was measured and expressed as relative fluorescence (RF) in percent of base line vs. time (t) in seconds (s).

[0043] FIG. 5: ETRA-Specific Artificial Transcription Factor Blocks ET-1 Dependent Contraction of Human Uterine Smooth Muscle Cells

[0044] ETRA+74VrepSNPS blocks ET-1-dependent contraction of human uterine smooth muscle cells (hUtSMC). hUtSMC were embedded into 3-dimensional collagen lattices. C=cells treated with buffer as control. B=cells treated with buffer and ET-1. V=cells treated with ETRA+74VrepSNPS and ET-1. RLA=relative lattice area in % of control (C). Details are described below.

[0045] FIG. 6: Increased Endosomal Escape of ETRA+74VrepS Compared to ETRA+74VrepSNPS

[0046] HeLa cells were incubated for two hours in OptiMEM media with 1 μM cathepsin B-insensitive ETRA+74VrepSNPS (marked NPS) or cathepsin B-sensitive ETRA+74VrepS (marked PS) for 2 hours. Cells were fixed, stained using anti-myc epitope antibody to detect artificial transcription factors, and images were taken. Nuclear import (NI) of artificial transcription factor was determined using image analysis, and was expressed as percentage of maximal fluorescence signal. Shown is the average of three independent experiments with 200 cells/experiment.

[0047] FIG. 7: Inclusion of a Cathepsin B Recognition Site Increases Activity of an ETRA-Specific Artificial Transcription Factor in a Luciferase Reporter Assay

[0048] HEK 293 FlpIn cells stably expressing Gaussia luciferase under the control of a hybrid CMV/TS+74 (target site for ETRA+74VrepS/NPS) and secreted alkaline phosphatase under control of a constitutive CMV promoter were treated with ETRA+74VrepS (contains cathepsin site—labeled PS) or ETRA+74VrepSNPS (without cathepsin site—labeled NPS). Treatment with an inactive mutant of ETRA+74VrepS lacking all zinc complexing cystein residues was used as control (labeled C). Luciferase and secreted alkaline phosphatase activity was measured 24 hours after treatment. Luciferase activity was normalized to secreted alkaline phosphatase activity and expressed as percentage of control. Shown is the average of three independent experiments with three technical replicates. Statistical significance was analyzed using one-way ANOVA analysis with Tukey HSD posthoc test. Groups labeled C, NPS and PS are significantly different (P<0.05).

[0049] FIG. 8: Inclusion of a Cathepsin B Recognition Site Increases Activity of a TLR4-Specific Artificial Transcription Factor in a Luciferase Reporter Assay

[0050] HEK 293 FlpIn cells stably expressing Gaussia luciferase under the control of a hybrid CMV/TS-222 (target site for TLR4-222ArepS/NPS) and secreted alkaline phosphatase under control of a constitutive CMV promoter were treated with TLR4-222ArepS (contains cathepsin site—labeled PS) or TLR4-222ArepSNPS (without cathepsin site—labeled NPS). Treatment with an unrelated artificial transcription factor served as control (labeled C). Luciferase and secreted alkaline phosphatase activity were measured 24 hours after treatment. Luciferase activity was normalized to secreted alkaline phosphatase activity and expressed as percentage of control. Shown is the average of three independent experiments with three technical replicates. Error bars represent SD.

[0051] FIG. 9: Inclusion of a Cathepsin B Recognition Site Increases Activity of an AR-Specific Artificial Transcription Factor in a Luciferase Reporter Assay

[0052] HEK 293 FlpIn cells stably expressing Gaussia luciferase under the control of a hybrid CMV/TS-236 (target site for AR-236ArepS/NPS) and secreted alkaline phosphatase under control of a constitutive CMV promoter were treated with AR-236ArepS (contains cathepsin site—labeled PS) or AR-236ArepSNPS (without cathepsin site—labeled NPS). Treatment with an unrelated artificial transcription factor served as control (labeled C). Luciferase and secreted alkaline phosphatase activity were measured 24 hours after treatment. Luciferase activity was normalized to secreted alkaline phosphatase activity and expressed as percentage of control. Shown is the average of three independent experiments with three technical replicates. Error bars represent SD.

[0053] FIG. 10: Inclusion of a Cathepsin B Recognition Site Increases Activity of an FcER1A-Specific Artificial Transcription Factor in a Luciferase Reporter Assay

[0054] HEK 293 FlpIn cells stably expressing Gaussia luciferase under the control of a hybrid CMV/TS-147 (target site for IgER-147ArepS/NPS) and secreted alkaline phosphatase under control of a constitutive CMV promoter were treated with IgER-147ArepS (contains cathepsin site—labeled PS) or IgER-147ArepSNPS (without cathepsin site—labeled NPS). Treatment with an unrelated artificial transcription factor served as control (labeled C). Luciferase and secreted alkaline phosphatase activity were measured 24 hours after treatment. Luciferase activity was normalized to secreted alkaline phosphatase activity and expressed as percentage of control. Shown is the average of three independent experiments with three technical replicates. Error bars represent SD.

[0055] FIG. 11: Treatment with ETRA+74VrepS Decreases ET-1 Dependent Contraction of Human Coronary Vessels

[0056] Isolated human coronary vessel rings were incubated for 3 days with 1 μM of the ETRA-specific, cathepsin B-sensitive artificial transcription factor ETRA+74VrepS or buffer control. Vessel rings were then mounted into a wire myograph and vessel response to the vasoconstrictor U46619 as well to increasing concentrations of ET-1 was measured. The ET-1 response of the vessels was expressed as percentage of the U46619 response. Shown is the average of 8 vessels per condition from one human donor heart. Error bars represent SD.

[0057] FIG. 12: Treatment of Humanized NSG Mice with IgER-147ArepS Results in Delayed Death Following Induction of Anaphylactic Shock

[0058] Humanized NSG mice (NOD-scid IL2Rg^{null} implanted with human CD34⁺ cells) were treated with vehicle (labeled c) or IgER-147ArepS five days and two days before injection of anti-dinitrophenyl (anti-DNP) IgE antibodies. Injection of DNP-BSA (DNP coupled to bovine serum albumin) was used to induce anaphylaxis (labeled+AS), while injection of BSA served as control (labeled—AS). Shown is the number of surviving animals (NOSA) over time in minutes (labeled t [min]). Induction of anaphylaxis in vehicle treated mice (circle) leads to the rapid death of the animals (zero survivors at ten minutes after induction of anaphylaxis), while pretreatment with the FCER1A-specific artificial transcription factor IgER-147ArepS results in the prolonged survival of the treated animals.

### DETAILED DESCRIPTION OF THE INVENTION

[0059] The invention relates to an artificial transcription factor comprising a polydactyl zinc finger protein targeting specifically a gene promoter, for example a receptor gene promoter, in particular a membrane-bound receptor gene promoter or a nuclear receptor gene promoter, or a haploinsufficient gene promoter, fused to an inhibitory or activatory protein domain, a nuclear localization sequence, a protein transduction domain, and an endosome-specific protease recognition site, and to pharmaceutical compositions comprising such an artificial transcription factor. Furthermore the invention relates to the use of such artificial transcription factors for modulating the expression of genes, for example receptor genes, such as membrane-bound or nuclear receptor genes, or haploinsufficient genes, and in treating diseases caused or modulated by proteins encoded by the genes, the promoters of which are targeted by the transcription factors of the invention, for example receptor proteins, such as membrane-bound or nuclear receptor proteins, or proteins produced by haploinsufficient genes.

[0060] In the context of this invention, a promoter is defined as the regulatory region of a gene as well known in the art. Again in this context, a gene is defined, as well known in the art, as genomic region containing regulatory sequences as well as sequences for the gene product resulting in the production of proteins or RNAs.

[0061] In the context of the present invention, a polydactyl zinc finger protein targeting “specifically” a gene promoter means that the protein has a binding affinity of 20 nM or less towards its DNA target.

[0062] In the context of the present invention, a membrane-bound receptor gene causes the production of a protein or a protein that is part of a protein complex capable of binding to extracellular ligands and relaying the signal of ligand binding across the cellular membrane causing a cellular response. Also in the context of the present invention, a nuclear receptor gene causes the production of a soluble protein localized to the nucleus or the cytosol capable of binding cell-permeable ligands and capable of acting as transcription factor or accessory to a transcription factor for the modulation of gene expression upon binding their cognate ligand.

[0063] In the context of the present invention, a haploinsufficient gene is defined as a gene capable of causing the production of sufficient gene product in all cell types under all circumstances only if two functional gene copies are present in the genome. Thus, mutation of one gene copy of a haploinsufficient gene causes insufficient gene product generation in some or all cells of an organism under some or all physiological circumstances.

[0064] In the context of the invention, an endosome-specific protease recognition site is a peptide sequence that is recognized and cleaved in a sequence-specific manner by proteases resident in the endosomal compartment. Again in the context of this invention, a protein transduction domain is defined as a peptide capable of transporting proteins such as artificial transcription factors across the plasma membrane into the intracellular compartment.

[0065] Treatment of many diseases is based on modulating cellular receptor signaling. Examples are high blood pressure wherein beta blockers inhibit the function of the beta adrenergic receptors, depression wherein serotonin uptake blockers increase agonist concentration and thus serotonin receptor signaling, or glaucoma wherein prostaglandin analogues activate prostaglandin receptors, in turn decreasing intraocular pressure. Traditionally, small molecules either in the form of receptor agonist or antagonists are used to impact receptor signaling for therapeutic purposes. However, cellular receptor signaling can also be influenced by direct modulation of receptor protein expression.

[0066] Pathological processes amenable to direct modulation of receptor expression levels are, for example, the following: Patients with congestive heart failure due to congenital heart disease will benefit from the upregulation of beta-adrenoceptors, since downregulation of this receptor in the myocardium is associated with the risk of post-operative heart failure. In Parkinson's disease, treatment with dopaminergic medication suppresses the availability of dopamine receptors, thus, upregulation of dopamine receptor will improve the efficacy of dopaminergic medication. In epilepsy, insufficient expression of cannabinoid receptors in the hippocampus is involved in disease etiology, thus, upregulation of cannabinoid receptor will be a viable therapy for epileptic patients.

[0067] For genetic diseases caused by haploinsufficiency of a receptor protein, such as insulin-like growth factor I receptor causing growth retardation, but also others, additional activation of the remaining functional receptor gene will be beneficial for the patient. Furthermore and among others, induction and perpetuation of pathological autoimmunity is connected to inappropriate signaling from Toll-like receptors. Thus, downregulation of Toll-like receptors breaks the vicious cycle of various autoimmune diseases. In allergic disease, prevention of the IgE-mediated signaling through the high-affinity IgE receptor is useful to manage allergic reactions. In cancer, downregulation of growth factor receptors or upregulation of extracellular matrix receptors are beneficial for the prevention of tumor progression.

[0068] Among such receptor molecules are proteins from the so called seven-transmembrane or G protein coupled receptor (GPCR) family of proteins, characterized by seven transmembrane domains anchoring the receptor in the plasma membrane and a G protein dependent signaling cascade. Examples for such proteins are receptors A and B for endothelin. Other receptor proteins are anchored via a single transmembrane region, for example the receptor for lipopolysaccharide, Toll-like receptor 4, or various cytokine receptors, such as IL-4 receptor. Other receptors consist of multimeric protein complexes, for example the high-affinity receptor for IgE antibodies that consists of alpha, beta and gamma chains, or the T-cell receptor consisting of alpha, beta, gamma, delta, epsilon and zeta chains. Thus, subsumed under the term “receptor molecule” are proteins from different protein families with very different modes of action.

[0069] Receptors considered in the present invention are human receptor molecules encoded by HTR1A, HTR1B, HTR1D, HTR1E, HTR1F, HTR2A, HTR2B, HTR2C, HTR4, HTR5A, HTR5BP, HTR6, HTR7, CHRM1, CHRM2, CHRM3, CHRM4, CHRM5, ADORA1, ADORA2A, ADORA2B, ADORA3, ADRA1A, ADRA1B, ADRA1D, ADRA2A, ADRA2B, ADRA2C, ADRB1, ADRB2, ADRB3, AGTR1, AGTR2, APLNR, GPBAR1, NMBR, GRPR, BRS3, BDKRB1, BDKRB2, CNR1, CNR2, CCR1, CCR2, CCR3, CCR4, CCR5, CCR6, CCR7, CCR8, CCR9, CCR10, CXCR1, CXCR2, CXCR3, CXCR4, CXCR5, CXCR6, CXCR7, CX3CR1, XCR1, CCKAR, CCKBR, C3AR1, C5AR1, GPR77, DRD1, DRD2, DRD3, DRD4, DRD5, EDNRA, EDNRB, GPER, FPR1, FPR2, FPR3, FFAR1, FFAR2, FFAR3, GPR42, GALR1, GALR2, GALR3, GHSR, FSHR, LHCGR, TSHR, GNRHR, GNRHR2, HRH1, HRH2, HRH3, HRH4, HCAR1, HCAR2, HCAR3, KISS1R, LTB4R, LTB4R2, CYSLTR1, CYSLTR2, OXER1, FPR2, LPAR1, LPAR2, LPAR3, LPAR4, LPAR5, S1PR1, S1PR2, S1PR3, S1PR4, S1PR5, MCHR1, MCHR2, MC1R, MC2R, MC3R, MC4R, MC5R, MTNR1A, MTNR1B, MLNR, NMUR1, NMUR2, NPFFR1, NPFFR2, NPSR1, NPBWR1, NPBWR2, NPY1R, NPY2R, PPYR1, NPY5R, NPY6R, NTSR1, NTSR2, OPRD1, OPRK1, OPRM1, OPRL1, HCRTR1, HCRTR2, P2RY1, P2RY2, P2RY4, P2RY6, P2RY11, P2RY12, P2RY13, P2RY14, QRFPR, PTAFR, PROKR1, PROKR2, PRLHR, PTGDR, PTGDR2, PTGER1, PTGER2, PTGER3, PTGER4, PTGFR, PTGIR, TBXA2R, F2R, F2RL1, F2RL2, F2RL3, RXFP1, RXFP2, RXFP3, RXFP4, SSTR1, SSTR2, SSTR3, SSTR4, SSTR5, TACR1, TACR2, TACR3, TRHR, TAAR1, UTS2R, AVPR1A, AVPR1B, AVPR2, OXTR, CCRL2, CMKLR1, GPR1, GPR3, GPR4, GPR6, GPR12, GPR15, GPR17, GPR18, GPR19, GPR20, GPR21, GPR22, GPR25, GPR26, GPR27, GPR31, GPR32, GPR33, GPR34, GPR35, GPR37, GPR37L1, GPR39, GPR42, GPR45, GPR50, GPR52, GPR55, GPR61, GPR62, GPR63, GPR65, GPR68, GPR75, GPR78, GPR79, GPR82, GPR83, GPR84, GPR85, GPR87, GPR88, GPR101, GPR119, O3FAR1, GPR132, GPR135, GPR139, GPR141, GPR142, GPR146, GPR148, GPR149, GPR150, GPR151, GPR152, GPR153, GPR160, GPR161, GPR162, GPR171, GPR173, GPR174, GPR176, GPR182, GPR183, LGR4, LGR5, LGR6, LPAR6, MAS1, MAS1L, MRGPRD, MRGPRE, MRGPRF, MRGPRG, MRGPRX1, MRGPRX2, MRGPRX3, MRGPRX4, OPN3, OPN5, OXGR1, P2RY8, P2RY10, SUCNR1, TAAR2, TAAR3, TAAR4P, TAAR5, TAAR6, TAAR8, TAAR9, CCBP2, CCRL1, DARC, CALCR, CALCRL, CRHR1, CRHR2, GHRHR, GIPR, GLP1R, GLP2R, GCGR, SCTR, PTH1R, PTH2R, ADCYAP1R1, VIPR1, VIPR2, BAI1, BAI2, BAI3, CD97, CELSR1, CELSR2, CELSR3, ELTD1, EMR1, EMR2, EMR3, EMR4P, GPR56, GPR64, GPR97, GPR98, GPR110, GPR111, GPR112, GPR113, GPR114, GPR115, GPR116, GPR123, GPR124, GPR125, GPR126, GPR128, GPR133, GPR144, GPR157, LPHN1, LPHN2, LPHN3, CASR, GPRC6A, GABBR1, GABBR2, GRM1, GRM2, GRM3, GRM4, GRM5, GRM6, GRM7, GRM8, GPR156, GPR158, GPR179, GPRC5A, GPRC5B, GPRC5C, GPRC5D, TAS1R1, TAS1R2, TAS1R3, FZD1, FZD2, FZD3, FZD4, FZD5, FZD6, FZD7, FZD8, FZD9, FZD10, SMO, GPR107, GPR137, OR51E1, TPRA1, GPR143, THRA, THRB, RARA, RARB, RARG, PPARA, PPARD, PPARG, NR1D1, NR1D2, RORA, RORB, RORC, NR1H4, NR1H5P, NR1H3, NR1H2, VDR, NR1I2, NR1I3, HNF4A, HNF4G, RXRA, RXRB, RXRG, NR2C1, NR2C2, NR2E1, NR2E3, NR2F1, NR2F2, NR2F6, ESR1, ESR2, ESRRA, ESRRB, ESRRG, AR, NR3C1, NR3C2, PGR, NR4A1, NR4A2, NR4A3, NR5A1, NR5A2, NR6A1, NR0B1, NR0B2, HTR3A, HTR3B, HTR3C, HTR3D, HTR3E, GABRA1, GABRA2, GABRA3, GABRA4, GABRA5, GABRA6, GABRB1, GABRB2, GABRB3, GABRG1, GABRG2, GABRG3, GABRD, GABRE, GABRQ, GABRP, GABRR1, GABRR2, GABRR3, GLRA1, GLRA2, GLRA3, GLRA4, GLRB, GRIA1, GRIA2, GRIA3, GRIA4, GRID1, GRID2, GRIK1, GRIK2, GRIK3, GRIK4, GRIK5, GRIN1, GRIN2A, GRIN2B, GRIN2C, GRIN2D, GRIN3A, GRIN3B, CHRNA1, CHRNA2, CHRNA3, CHRNA4, CHRNA5, CHRNA6, CHRNA7, CHRNA9, CHRNA10, CHRNB1, CHRNB2, CHRNB3, CHRNB4, CHRNG, CHRND, CHRNE, P2RX1, P2RX2, P2RX3, P2RX4, P2RX5, P2RX6, P2RX7, ZACN, AGER, TLR1, TLR2, TLR3, TLR4, TLR5, TLR6, TLR7, TLR8, TLR9, TLR10, TLR11, LILRA1, LILRA2, LILRA3, LILRA4, LILRA5, LILRA6, LILRB1, LILRB2, LILRB3a, LILRB4, LILRB5, LILRB6, LILRB7, EGFR, ERBB2, ERBB3, ERBB4, GFRa1, GFRa2, GFRa3, GFRa4, NPR1, NPR2, NPR3, NPR4, NGFR, NTRK1, NTRK2, NTRK3, EGFR, ERB2, ERB3, ERB4, INSR, IRR, IG1R, PDGFalpha, PDGFbeta, Fms, Kit, Flt3, FGFR1, FGFR2, FGFR3, FGFR4, BFR2, VGR1, VGR2, VGR3, EPA1, EPA2, EPA3, EPA4, EPA5, EPA7, EPA8, EPB1, EPB2, EPB3, EPB4, EPB6, TrkA, TrkB, TrkC, UFO, TYRO3, MERK, TIE1, TIE2, RON, MET, DDR1, DDR2, RET, ROS, LTK, ROR1, ROR2, RYK, PTK7, and KIT.

[0070] Further receptors considered are human receptors recognizing interleukin (IL)-1, IL-2, IL-3, IL-4, IL-5, IL-6, IL-7, IL-8, IL-9, IL-10, IL-11, IL-12, IL-13, IL-14, IL-15, IL-16, IL-17, IL-18, IL-19, IL-20, IL-21, IL-22, IL-23, IL-24, IL-25, IL-26, IL-27, IL-28, IL-29, IL-30, IL-31, IL-32, IL-33, IL-34, IL-35, IL-36, IL-37, IL-38, leptin, interferon-alpha, interferon-beta, interferon-gamma, tumor necrosis factor alpha, lymphotoxin, prolactin, oncostatin M, leukemia inhibitory factor, colony-stimulating factor, immunoglobulin A, immunoglobulin D, immunoglobulin G, immunoglobulin M, immunoglobulin E, human leukocyte antigen (HLA) A, HLA-B, HLA-C, HLA-E, HLA-F, HLA-G, HLA-DP, HLA-DQ, HLA-DR, transforming growth factor alpha, transforming growth factor beta, nerve growth factor, brain-derived neurotrophic factor, neurotrophin-3, neurotrophin-4, adrenomedullin, angiopoietin, autocrine motility factor, bone morphogenetic proteins, erythropoietin, fibroblast growth factor, glial cell line-derived neurotrophic factor, granulocyte colony-stimulating factor, granulocyte macrophage colony-stimulating factor, growth differentiation factor-9, hepatocyte growth factor, hepatoma-derived growth factor, insulin-like growth factor, insulin, migration-stimulating factor, myostatin, platelet-derived growth factor, thrombopoietin, vascular endothelial growth factor, placental growth factor, connective tissue growth factor, and growth hormone.

[0071] Further considered are receptors encoded by homologous non-human genes, for example by porcine, equine, bovine, feline, canine, or murine genes; and receptors encoded by homologous plant receptor genes, for example genes found in crop plants such as wheat, barley, corn, rice, rye, oat, soybean, peanut, sunflower, safflower, flax, beans, tobacco, or life-stock feed grasses, and genes found in fruit plants such as apple, pear, banana, citrus fruit, grape or the like.

[0072] In contrast to almost all other cellular receptors that are membrane-anchored and consist or contain membrane-spanning proteins, nuclear receptors are soluble proteins incorporating ligand binding and transcription factor activity in one polypeptide. Nuclear receptors are either localized in the cytosol or the nucleoplasm, where they are activated upon ligand binding, dimerize and become active transcription factors regulating a vast array of transcriptional programs. Unlike above mentioned membrane-anchored receptors that bind their ligands outside the cell and transduce the signal across the plasma membrane into the cell, nuclear receptors bind lipophilic ligands that are capable of crossing the plasma membrane to gain access to their cognate receptor. In addition, most receptors rely on intricate signal amplification mechanisms before the intended cellular outcome is achieved. Nuclear receptors, on the other hand, directly convert the binding of a ligand into a cellular response.

[0073] Treatment of many diseases is based on modulating nuclear receptor signaling. Examples are inflammatory processes, wherein glucocorticoids activate the glucocorticosteriod receptor, prostate cancer, wherein antagonists of androgen receptor possess beneficial therapeutic effect, or breast cancer, wherein blocking estrogen receptor signaling proves useful. Traditionally, small molecules either in the form of nuclear receptor agonist or antagonists are used to impact receptor signaling for therapeutic purposes. However, nuclear receptor signaling can also be influenced by direct modulation of nuclear receptor protein expression, and such modulation is the subject of the present invention.

[0074] Nuclear receptors considered in the present invention are human nuclear receptors encoded by the human genes AR, ESR1, ESR2, ESRRA, ESRRB, ESRRG, HNF4A, HNF4G, NR0B1, NR0B2, NR1D1, NR1D2, NR1H2, NR1H3, NR1H4, NR1I2, NR1I3, NR2C1, NR2C2, NR2E1, NR2E3, NR2F1, NR2F2, NR2F6, NR3C1, NR3C2, NR4A1, NR4A2, NR4A3, NR5A1, NR5A2, NR6A1, PGR, PPARA, PPARD, PPARG, RARA, RARB, RARG, RORA, RORB, RORC, RXRA, RXRB, RXRG, THRA, THRB and VDR.

[0075] Further considered are non-human nuclear receptors, for example porcine, equine, bovine, feline, canine, or murine transcription factors, encoded by genes related to the mentioned human nuclear receptor genes.

[0076] For genetic diseases caused by haploinsufficiency of a gene promoter, such as insulin-like growth factor I receptor haploinsufficiency causing growth retardation or OPA1 haploinsufficiency causing dominant optic atrophy, but also others, additional activation of the remaining functional gene copy is beneficial for the patient. Artificial transcription factors of the invention are capable of increasing expression from haploinsufficient gene promoters, thus suitable for the treatment of diseases associated with haploinsufficiency.

[0077] Considered in the present invention are the following human genes and their respective promoters associated with haploinsufficiency, and disease as amenable to treatment using artificial transcription factors of the invention: PRKAR1A, FBN1, ELN, TCOF1, ENG, GLI3, TCF4, GRN, NKX2-1, SOX10, SHOX, MC4R, GATA3, NKX2-5, TBX1, COL10A1, PAX6, LMX1B, BMPR2, PAX9, SOX9, TRPV4, SPAST, TBX5, TWIST1, EHMT1, FOXC2, TBX3, TNXB, DSP, OPA1, TRPS1, RUNX2, SCN1A, HOXD13, NSD1, SATB2, PRPF31, SOX2, COL6A1, APC, RAI1, PAX3, ZEB2, SLC40A1, AFG3L2, KCNQ2, SALL1, PPARG, GDF5, GCH1, MYH9, SALL4, PITX2, FOXF1, RAD51, PKD2, NFKBIA, MSX1, MSX2, COL3A1, SH3TC2, SBDS, SIX6, KRIT1, SLC33A1, PARK2, ABCA4, MYOC, PAFAH1B1, CDKN1C, CREBBP, FGF3, MYF6, MPZ, ITPR1, EDN3, C3, TYRP1, OFC12, ATM, FOXP2, PHOX2B, COCH, PITX1, EYA1, FOXC1, KLF1, GATA4, KIT, MYCN, COL5A1, RNF135, MIR146A, SI, NLRP12, NDUFA13, SPRED1, REEP1, SLC6A19, CHD7, NCF1, IRF6, RXFP2, ZMPSTE24, ATL 1, EGLN1, NLRP3, KIF1B, BCMO1, SLC6A20, FOXL2, RTN4R, TSC1, WWOX, POLG2, LGI1, RECQL3, CNTNAP2, ATP2C1, KCNQ4, RPS19, ABCC6, STXBP1, NBN, ROBO1, ROR2, AGRP, STK11, KCNJ10, LHX4, FGF10, LIG4, ACVRL1, CAV3, GDF6, SMAD4, MYBPC3, IRS2, MSH6, ABCC8, GARS, CDKN2A, PORCN, PHEX, ARX, DMD, TPM1, NOTCH1, ABL1, RYR1, PTH1R, PAX8, PAX2, BRAF, MAPT, MC3R, KCNH2, LMNA, KRT5, SOD1, IGF1, MNX1, HNF1A, SLC2A1, GCK, GABRG2, FUS, DSG2, DCC, OFC1, CHRNA4, BRCA1, BDNF, BMP2, ATP2A2, ALX4, MITF, SIX3, SMARCB1, RANBP2, GDNF, MYC, ATP1A2, SLC6A4, FOXG1, IGF1R, FGFR1 and SERPINA6.

[0078] Further considered are non-human genes, for example porcine, equine, bovine, feline, canine, or murine genes, as well as their homologous human genes, plant genes, for example genes found in crop plants such as wheat, barley, corn, rice, rye, oat, soybean, peanut, sunflower, safflower, flax, beans, tobacco, or life-stock feed grasses, and genes found in fruit plants such as apple, pear, banana, citrus fruit, grape or the like, under the control of a haploinsufficient promoter.

[0079] Artificial transcription factors are useful for modulating gene expression, and thus are useful for the treatment of diseases wherein the modulation of gene expression is beneficial. While conventional drugs modulate the activity of a certain protein, e.g. by agonistic or antagonistic action, artificial transcription factors alter the availability of these proteins either by increasing or decreasing gene expression.

[0080] Using the traditional small molecule approach, the identification of therapeutically active small molecules acting through modulation of protein activity mostly relies on extensive and time-consuming screening procedures among a wide variety of different molecules from different classes of substances, and modulation of gene expression by small molecules is so far not possible. In contrast, artificial transcription factors of the invention all belong to the same substance class with a highly defined overall composition. Two hexameric zinc finger protein-based artificial transcription factors targeting two very diverse promoter sequences still have a minimal amino acid sequence identity of 85% with an overall similar tertiary structure, and can be generated via a standardized method (as described below) in a fast and economical manner. Thus, artificial transcription factors of the invention combine, in one class of molecule, exceptionally high specificity for a very wide and diverse set of targets with overall similar composition. As for all biologicals, immunogenicity in the form of anti-drug antibodies and the associated immunological reaction are a concern. However, due to the high conservation of zinc finger modules, such an immunological reaction will be minor or absent following application of artificial transcription factors of the invention, or might be avoided or further minimized by small changes to the overall structure eliminating immunogenicity while still retaining target site binding and thus function. Furthermore, modification of artificial transcription factors of the invention with polyethylene glycol is considered to reduce immunogenicity.

[0081] Since artificial transcription factors are tailored to act specifically on the promoter region of specific genes, the use of artificial transcription factors allows for selectively targeting even closely related proteins. This is based on the only loose conservation of the promoter regions even of closely related proteins. Taking advantage of the high selectivity of the artificial transcription factors according to the invention, even a tissue-specific targeting of a drug action is possible based on the oftentimes tissue-specific expression of certain members of a given protein family that are individually addressable using artificial transcription factors.

[0082] In addition, formulation of artificial transcription factors into drugs can rely on previous experience further expediting the drug development process.

[0083] However, artificial transcription factors need to be present in the nuclear compartment of cells in order to be effective as they act through modulation of gene expression. Until now, the method of choice for the therapeutic delivery of artificial transcription factors is either in the form of plasmid DNA through transfection or by employing viral vectors. Plasmid transfection for therapeutic purposes has low efficacy, while viral vectors have exceptionally high potential for immunogenicity, thus limiting their use in repeated application of a certain treatment. Thus other modes of delivering artificial transcription factors, for example in protein form instead of as nucleic acids, are required.

[0084] Protein transduction domain (PTD) mediated, intracellular delivery of artificial transcription factors is a new way of taking advantage of the high selectivity and versatility of artificial transcription factors in a novel fashion. Protein transduction domains are small peptides capable of crossing the plasma membrane barrier and delivering cargo proteins into the cell. Such protein transduction domains are, for example, the HIV derived TAT peptide, mT02, mT03, R9, ANTP, and others. The mode of cellular uptake is likely by endocytosis, and it was shown that the TAT peptide is able to induce a cell-type independent macropinocytotic uptake when fused to cargo proteins (Wadia J. S. et al., 2004, Nat Med 10, 310-315). While crossing the barrier of the plasma membrane and uptake into endosomal vesicles is the first step in entering the cell, topologically, the inside of the endosomal compartment is identical to the outside of the cell. Thus, endosomal localization is not equivalent to cytoplasmic or nucleoplasmic localization. However, likely through leakiness of the endosomal compartment and/or some intrinsic property of the cargo or the protein transduction domain in terms of modulating membrane integrity, delivered proteins are capable to escape endosomes and reach other truly intracellular targets. The co-delivery of the membrane-active, fusogenic peptide TAT-HA2 or others such as GALA or KALA peptide improved endosomal escape of delivered proteins somewhat due to the disintegration of endosomal vesicles. Indeed, mechanisms capable of disrupting the endosomal membrane are the state-of-the-art for increased endosomal escape of cargo proteins delivered using a protein transduction domain.

[0085] However, membrane disrupting agents are not as efficient in promoting delivery as expected. This might be due to the inherent properties of protein transduction domains. Protein transduction domains are known to strongly interact with cellular membranes. This strong membrane interaction is part of the mechanism by which protein internalization and protein delivery is triggered. Thus, following internalization into endosomes, this strong membrane interaction of the protein transduction domain now with the inside of the endosomal membrane might actually inhibit redistribution even after the rupture of endosomal vesicles. TAT-fused artificial transcription factors may mainly reside in the endosomal compartment with some nuclear localization. Interestingly, in a large percentage of cells stained for TAT-artificial transcription factor, ruptured endosomal vesicles were found open to the cytosol with endosomal membranes clearly decorated with TAT fusion protein, consistent with endosomal entrapment of a considerable amount of delivered protein even after endosomal membrane rupture. Thus, while essential for uptake into the cell, protein transduction domains hinder efficient subcellular localization once protein transduction takes place.

[0086] The endosome is a very dynamic organelle known to mature and acquire lysosomal characteristics, such as acquiring proteases and indicating a drop in vesicular pH before fusion with the lysosomal compartment and proteolytic degradation of the endosomal content. The process of endosomal maturation accompanied by an increase in lumenal proteolytic activity is detrimental for therapeutic proteins delivered using protein transduction domains, since such proteins are then subject to proteolysis. However, this process can be turned into an advantage. Endosomal maturation is a sequential process wherein different sets of proteases are activated at different stages in a pH-dependent manner. Interestingly, proteases activated early in the process involved in protein processing are more sequence specific than proteases activated late during maturation essential for general hydrolysis of proteins. Now, incorporation of a cleavage site for an early endosomal protease between the protein transduction domain and the cargo protein leads to the sequence-specific digestion of the therapeutic protein separating the protein transduction domain from the cargo protein once the therapeutic protein has reached the endosomal lumen. Thus, upon endosomal rupture, frequently observable following TAT-mediated delivery of artificial transcription factors, the cargo protein is no longer bound to the inside of the endosomal membrane due to inherent properties of the protein transduction domain but is detached from the membrane in order to escape into the cytosol (FIG. 1).

[0087] Proteases active in the endosomal compartment are the cathepsins, a large family of diverse proteases with different characteristics in terms of pH optimum and sequence specificity. Cathepsin B, for example, has a pH optimum around neutral pH and is sequence specific making this protease a good choice as TAT-cargo fusion protein processing endosomal protease. However, other cathepsins, such as cathepsin H, L, S, C, K, O, F, V, X, W, D or E, might also be useful for the purpose of separating protein transduction domains from their cargo once the endosomal compartment is reached. Taking advantage of the tissue and cell-type specific expression of certain cathepsins, improved subcellular localization and thus effective therapeutic action of such therapeutics can be limited to certain cell types by including cathepsin recognition sites specific for these tissues or cells.

[0088] The use of a protease recognition site, such as a cathepsin B site, in the present invention to improve the endosomal escape of cargo proteins such as artificial transcription factors, is beyond state-of-the-art. Unlike known approaches, no additional endosomal vesicle rupture is introduced, but the cargo protein is separated from the protein transduction domain after entry into the endosome to allow for efficient escape from the endosome following base-line vesicle rupture.

[0089] In known examples, cell penetrating peptides were used together with protease recognition sites (EP 2 399 939, WO 2008/063113), for the sole purpose of increasing the selectivity of protein transduction. By masking the protein transduction domain with an inhibitory peptide, cargo transport across the plasma membrane is prevented. Upon encountering a tissue and/or cell type-specific extracellular protease this inhibitory peptide is cleaved allowing now for protein transport across the plasma membrane. These state-of-the art examples are substantially different from the particular constructs leading to increase of endosomal escape described in the present invention.

[0090] In another known example, an endosomal protease recognition site was used together with a protein transduction domain (WO 2005/003315). In this instance, the procedure provided is a method of transport of DNA (used for transfection) into cells. The endosomal protease site was only used as a marker to confirm entry of the DNA complex via an endosomal route, but not to enhance endosomal escape of DNA.

[0091] In contrast to this described use of an endosomal protease recognition site as a marker, the constructs of the present invention provide increased endosomal escape of a functional protein, not a marker for the detection of a route of entry of a DNA complex.

[0092] Further, the artificial transcription factors of the invention comprise a nuclear localization sequence (NLS). Nuclear localization sequences considered are amino acid motifs conferring nuclear import through binding to proteins defined by gene ontology GO:0008139, for example clusters of basic amino acids containing a lysine residue (K) followed by a lysine (K) or arginine (R) residue, followed by any amino acid (X), followed by a lysine or arginine residue (K-K/R-X-K/R consensus sequence, Chelsky D. et al., 1989 Mol Cell Biol 9, 2487-2492) or the SV40 NLS (SEQ ID NO: 37), with the SV40 NLS being preferred.

[0093] The artificial transcription factor of the present invention might also contain other transcriptionally active protein domains of proteins defined by gene ontology GO:0001071 such as N-terminal KRAB, C-terminal KRAB, SID and ERD domains, preferably KRAB or SID. Activatory protein domains considered are the transcriptionally active domains of proteins defined by gene ontology GO:0001071, such as VP16, VP64 (tetrameric repeat of VP16), CJ7, p65-TA1, SAD, NF-1, AP-2, SP1-A, SP1-B, Oct-1, Oct-2, Oct2-5x, MTF-1, BTEB-2, and LKLF, preferably VP64 and AP-2.

[0094] Considered are also artificial transcription factors of the invention containing pentameric, hexameric, heptameric or octameric zinc finger proteins wherein individual zinc finger modules are exchanged to improve binding affinity towards target sites of the respective nuclear receptor promoter gene or to alter the immunological profile of the zinc finger protein for improved tolerability.

[0095] The domains of the artificial transcription factors of the invention may be connected by short flexible linkers. A short flexible linker has 2 to 8 amino acids, preferably glycine and serine. A particular linker considered is GGSGGS (SEQ ID NO: 38). Artificial transcription factors may further contain markers, such as epitope tags, to ease their detection and processing.

[0096] Co-delivery of fusogenic peptides, such as TAT-HA2, GALA or KALA, was shown to increase endosomal escape of cargo proteins following protein transduction. However, co-delivery of such peptides is probably not a viable option to increase protein delivery in vivo, as this implies a two-component system—fusogenic peptide and therapeutic protein—with likely differences in distribution and elimination behavior for the components in a living system.

[0097] Incorporation of fusogenic peptides into the therapeutic protein is a better option to circumvent this two-component problem mentioned above. However, these fusogenic peptides have certain restrictions in terms of size, in possibility to interact, and in N- as well as C-terminal amino acid sequence in order to act as fusogen for endosomal membranes. Thus, simply incorporating a fusogenic peptides into a cargo protein is not yet a viable option to increase endosomal escape.

[0098] However, incorporation of fusogenic peptides into artificial transcription factors of the invention via an endosomal protease-sensitive linker region allows for the simultaneous delivery of cargo protein and fusogenic peptide into the endosomal lumen. Once inside the endosome, separation of the artificial transcription factor from the protein transduction domain occurs, and in addition the liberation of fusogenic peptides. Through the inclusion of multiple repeats of fusogenic peptides, separating each fusogenic peptide subunit by an endosomal protease site, multiple fusogenic peptides are delivered to the endosome, thereby increasing endosomal rupture.

Selection of Target Sites within a Given Promoter Region

[0099] Target site selection is crucial for the successful generation of a functional artificial transcription factor. For an artificial transcription factor to modulate target gene expression in vivo, it must bind its target site in the genomic context of the target gene. This necessitates the accessibility of the DNA target site, meaning chromosomal DNA in this region is not tightly packed around histones into nucleosomes and no DNA modifications such as methylation interfere with artificial transcription factor binding. While large parts of the human genome are tightly packed and transcriptionally inactive, the immediate vicinity of the transcriptional start site (−1000 to +200 bp) of an actively transcribed gene must be accessible for endogenous transcription factors and the transcription machinery, such as RNA polymerases. Thus, selecting a target site in this area of any given target gene will greatly enhance the success rate for the generation of an artificial transcription factor with the desired function in vivo.

Selection of Target Sites within the Human Endothelin Receptor A (ETRA) Promoter Region

[0100] The promoter region of the human ETRA gene was analyzed for the presence of potential 18 bp target sites with the general composition of (G/CANN)₆, wherein G is the nucleotide guanine, C the nucleotide cytosine, A the nucleotide adenine and N stands for each of the four nucleotide guanine, cytosine, adenine and thymine. Three target sites were selected based on their position relative to the transcription start site and designated ETRA_TS-37 (SEQ ID NO: 39), ETRA_TS-50 (SEQ ID NO: 40) and ETRA_TS+74 (SEQ ID NO: 41). Considered are also target sites of the general composition (G/C/ANN)₅ and (G/C/ANN)₆ chosen from the regulatory region of the ETRA gene 2000 bp upstream of the transcription start.

Selection of Target Sites within the Human Endothelin Receptor B (ETRB) Promoter Region

[0101] The promoter region of the human ETRB gene was analyzed for the presence of potential 18 bp target sites with the general composition of (G/C/ANN)₆, wherein G is the nucleotide guanine, C the nucleotide cytosine, A the nucleotide adenine and N stands for each of the four nucleotide guanine, cytosine, adenine and thymine. Two target sites were selected based on their position relative to the transcription start site and designated ETRB_TS-1149 (SEQ ID NO: 42) and ETRB_TS-487 (SEQ ID NO: 43). Considered are also target sites of the general composition (G/C/ANN)₅ and (G/C/ANN)₆ chosen from the regulatory region of the ETRB gene 2000 bp upstream of the transcription start.

Selection of Target Sites within the Human Toll-Like Receptor 4 (TLR4) Promoter Region

[0102] The promoter region of the human TLR4 gene was analyzed for the presence of potential 18 bp target sites with the general composition of (G/C/ANN)₆, wherein G is the nucleotide guanine, C the nucleotide cytosine, A the nucleotide adenine and N stands for each of the four nucleotide guanine, cytosine, adenine and thymine. Two target sites were selected based on their position relative to the transcription start site and designated TLR4_TS-55 (SEQ ID NO: 44), TLR4_TS-222 (SEQ ID NO: 45) and TLR4TS-276 (SEQ ID NO: 46). Considered are also target sites of the general composition (G/C/ANN)₅ and (G/C/ANN)₆ chosen from the regulatory region of the TLR4 gene 2000 bp upstream of the transcription start.

Selection of Target Sites within the Human High-Affinity IgE Receptor A (FCER1A) Promoter Region

[0103] The promoter region comprising the transcriptional start site of the human FCER1A gene was analyzed for the presence of potential 18 bp target sites with the general composition of (G/C/ANN)₆, wherein G is the nucleotide guanine, C the nucleotide cytosine, A the nucleotide adenine and N stands for each of the four nucleotide guanine, cytosine, adenine and thymine. Two target sites were selected based on their position relative to the transcription start site and designated IgER_TS-147 (SEQ ID NO: 47) and IgER_TS17 (SEQ ID NO: 48). Considered are also target sites of the general composition (G/C/ANN)₅ and (G/C/ANN)₆ chosen from the regulatory region of the FCER1A gene 2000 bp upstream of the transcription start.

Selection of Target Sites within the Human TGFbR1 Gene

[0104] The promoter region comprising the transcriptional start site of the human TGFbR1 gene was analyzed for the presence of potential 18 bp target sites with the general composition of (G/C/ANN)₆, wherein G is the nucleotide guanine, C the nucleotide cytosine, A the nucleotide adenine and N stands for each of the four nucleotide guanine, cytosine, adenine and thymine. One target site was selected based on its position relative to the translation start site and designated TGF_TS-390 (SEQ ID NO: 49). Considered are also target sites of the general composition (G/C/ANN)₅ and (G/C/ANN)₆ chosen from the regulatory region of the TGFbR1 gene 2000 bp upstream of the transcription start.

Selection of Target Sites within the Human Glucocorticoid, Androgen and Estrogen Receptor Gene Promoters

[0105] The promoter regions comprising 1000 bp including the transcriptional start site of the human glucocorticoid, androgen and estrogen receptor gene were analyzed for the presence of potential 18 bp target sites with the general composition of (G/C/ANN)₆, wherein G is the nucleotide guanine, C the nucleotide cytosine, A the nucleotide adenine and N stands for each of the four nucleotide guanine, cytosine, adenine and thymine. Three to four target sites in each promoter were selected based on their position relative to the transcription start site. The target sites found in the glucocorticoid receptor gene promoter are GR_TS1 (SEQ ID NO: 50), GR_TΩ (SEQ ID NO: 51), GR_TS3 (SEQ ID NO: 52), the target sites for the androgen receptor are AR_TS1 (SEQ ID NO: 53), AR_TS2 (SEQ ID NO: 54), AR_TS3 (SEQ ID NO: 55) and AR_TS-236 (SEQ ID NO: 56). The target sites identified in the estrogen receptor gene promoter are ER_TS1 (SEQ ID NO: 57), ER_TS2 (SEQ ID NO: 58) and ER_TS3 (SEQ ID NO: 59). Considered are also target sites of the general composition (G/C/ANN)₅ and (G/C/ANN)₆ chosen from the regulatory region of the glucocorticoid receptor, the estrogen receptor and the androgen receptor 2000 bp upstream of the transcription start.

Selection of Target Sites within the Human OPA1 Gene Promoter

[0106] A region 1000 bp upstream of the start codon of the human OPA1 open reading frame was analyzed for the presence of potential 18 bp target sites with the general composition of (G/C/ANN)₆, wherein G is the nucleotide guanine, C the nucleotide cytosine, A the nucleotide adenine and N stands for each of the four nucleotide guanine, cytosine, adenine and thymine. Four target sites, OPA_TS1 (SEQ ID NO: 60), OPA_TS2 (SEQ ID NO: 61), OPA_TS3 (SEQ ID NO: 62), and OPA_TS-165 (SEQ ID NO: 63) were chosen. Further considered are also target sites of the general composition (G/C/ANN)₅ and (G/C/ANN)₆ chosen from the regulatory region of the OPA1 open reading frame.

### Artificial Transcription Factors Targeting Receptor Gene Promoters

[0107] Hexameric zinc finger proteins targeting specific gene target sites were selected using a modified yeast one hybrid screen. Yeast containing the aureobasidin A resistance gene under control of a chimeric yeast promoter comprising a target site and the yeast cyc1 minimal promoter were transformed with a plasmid library of expression plasmids for hybrid activating transcription factors consisting of hexameric zinc finger proteins fused to the GAL4 activation domain. Upon binding of such a hybrid transcription factor to the chimeric yeast promoter described above, the aureobasidin A resistance gene is transcribed and confers resistance to this antibiotic relative to the strength of the interaction between the hexameric zinc finger and the target site tested. Using increasing selection pressure, hexameric zinc finger proteins with strong binding affinity to specific target sites are selected. Such zinc finger proteins specifically targeting are fused to the protein transduction domain TAT as well as the transcription activating domain VP64 or the inhibitor domains N-KRAB, C-KRAB or SID to obtain artificial transcription factors. To generate cathepsin B sensitive artificial transcription factors a cathepsin B site is introduced between the TAT protein transduction domain and the artificial transcription factor consisting of nuclear localization sequence, zinc finger protein and regulatory domain.

[0108] ETRA-specific hexameric zinc fingers are ETRA-37B (SEQ ID NO: 64), ETRA-37D (SEQ ID NO: 65), ETRA-50A (SEQ ID NO: 66), ETRA-50B (SEQ ID NO: 67), ETRA-50C (SEQ ID NO: 68), ETRA-50D (SEQ ID NO: 69), ETRA-50E (SEQ ID NO: 70), ETRA-50F (SEQ ID NO: 71), ETRA-50G (SEQ ID NO: 72), ETRA-50H (SEQ ID NO: 73), ETRA-501 (SEQ ID NO: 74), ETRA-50J (SEQ ID NO: 75), ETRA-50K (SEQ ID NO: 76), ETRA-50L (SEQ ID NO: 77), ETRA-50M (SEQ ID NO: 78), ETRA+74E (SEQ ID NO: 79), ETRA+74V (SEQ ID NO: 80), ETRA+74R (SEQ ID NO: 81), ETRA+74AA (SEQ ID NO: 82), ETRA+74AB (SEQ ID NO: 83). ETRA+74AC (SEQ ID NO: 84). ETRA+74AD (SEQ ID NO: 85). ETRA+74AE (SEQ ID NO: 86). ETRA+74AF (SEQ ID NO: 87). ETRA+74AG (SEQ ID NO: 88), and ETRA+74AH (SEQ ID NO: 89). Resulting ETRA-specific cathepsin B-sensitive VP64-(akt) or SID- (repS) containing transcription factors are ETRA+74Eakt (SEQ ID NO: 90), ETRA+74ErepS (SEQ ID NO: 91), ETRA+74Rakt (SEQ ID NO: 92), ETRA+74RrepS (SEQ ID NO: 93), ETRA+74Vakt (SEQ ID NO: 94), ETRA+74VrepS (SEQ ID NO: 95), ETRA+74AAakt (SEQ ID NO: 96), ETRA+74AArepS (SEQ ID NO: 97), ETRA+74ABakt (SEQ ID NO: 98), ETRA+74ABrepS (SEQ ID NO: 99), ETRA+74ACakt (SEQ ID NO:100), ETRA+74ACrepS (SEQ ID NO: 101), ETRA+74ADakt (SEQ ID NO: 102), ETRA+74ADrepS (SEQ ID NO: 103), ETRA+74AEakt (SEQ ID NO: 104), ETRA+74AErepS (SEQ ID NO: 105), ETRA+74AFakt (SEQ ID NO: 106), ETRA+74AFrepS (SEQ ID NO: 107), ETRA+74AGakt (SEQ ID NO: 108), ETRA+74AGrepS (SEQ ID NO: 109), ETRA+74AHakt (SEQ ID NO: 110), ETRA+74AHrepS (SEQ ID NO: 111), ETRA-37Bakt (SEQ ID NO: 112), ETRA-37BrepS (SEQ ID NO: 113), ETRA-37Dakt (SEQ ID NO: 114), ETRA-37DrepS (SEQ ID NO: 115), ETRA-50Aakt (SEQ ID NO: 116), ETRA-50ArepS (SEQ ID NO: 117), ETRA-50Bakt (SEQ ID NO: 118), ETRA-50BrepS (SEQ ID NO: 119), ETRA-50Cakt (SEQ ID NO: 120), ETRA-50CrepS (SEQ ID NO: 121), ETRA-50Dakt (SEQ ID NO: 122), ETRA-50DrepS (SEQ ID NO: 123), ETRA-50Eakt (SEQ ID NO: 124), ETRA-50ErepS (SEQ ID NO: 125), ETRA-50Fakt (SEQ ID NO: 126), ETRA-50FrepS (SEQ ID NO: 127), ETRA-50Gakt (SEQ ID NO: 128), ETRA-50GrepS (SEQ ID NO: 129), ETRA-50Hakt (SEQ ID NO: 130), ETRA-50HrepS (SEQ ID NO: 131), ETRA-50Iakt (SEQ ID NO: 132), ETRA-50IrepS (SEQ ID NO: 133), ETRA-50Jakt (SEQ ID NO: 134), ETRA-50JrepS (SEQ ID NO: 135), ETRA-50Kakt (SEQ ID NO: 136), ETRA-50KrepS (SEQ ID NO: 137), ETRA-50Lakt (SEQ ID NO: 138), ETRA-50LrepS (SEQ ID NO: 139), ETRA-50Makt (SEQ ID NO: 140), and ETRA-50MrepS (SEQ ID NO: 141). A cathepsin B non-sensitive artificial transcription factor is ETRA+74VrepSNPS (SEQ ID NO: 142). An inactive version of ETRA+74VrepS lacking all zinc coordinating cysteine residues for control purposes is ETRA+74Vmut_repS (SEQ ID NO: 143).

[0109] ETRB-specific hexameric zinc fingers are ETRB-1149H (SEQ ID NO: 144), ETRB-1149N (SEQ ID NO: 145), ETRB-487C (SEQ ID NO: 146), and ETRB-487E (SEQ ID NO: 147). Resulting ETRB-specific cathepsin B-sensitive VP64- (akt) or SID- (repS) containing transcription factors are ETRB-1149Hakt (SEQ ID NO: 148), ETRB-1149HrepS (SEQ ID NO: 149), ETRB-1149Nakt (SEQ ID NO: 150), ETRB-1149NrepS (SEQ ID NO: 151), ETRB-487Cakt (SEQ ID NO: 152), ETRB-487CrepS (SEQ ID NO: 153), ETRB-487Eakt (SEQ ID NO: 154), and ETRB-487ErepS (SEQ ID NO: 155).

[0110] TLR4-specific hexameric zinc fingers are TLR4-55B (SEQ ID NO: 156), TLR4-55E (SEQ ID NO: 157), TLR4-222A (SEQ ID NO: 158), TLR4-222B (SEQ ID NO: 159), TLR4-276B (SEQ ID NO: 160), and TLR4-276C (SEQ ID NO: 161). Resulting TLR4-specific cathepsin B-sensitive VP64- (akt) or SID- (repS) containing transcription factors are TLR4-55Bakt (SEQ ID NO: 162), TLR4-55BrepS (SEQ ID NO: 163), TLR4-55Eakt (SEQ ID NO: 164), TLR4-55ErepS (SEQ ID NO: 165), TLR4-222Aakt (SEQ ID NO: 166), TLR4-222ArepS (SEQ ID NO: 167), TLR4-222Bakt (SEQ ID NO: 168), TLR4-222BrepS (SEQ ID NO: 169), TLR4-276Bakt (SEQ ID NO: 170), TLR4-276BrepS (SEQ ID NO: 171), TLR4-276Cakt (SEQ ID NO: 172), and TLR4-276CrepS (SEQ ID NO: 173).

[0111] FCER1A-specific hexameric zinc fingers are IgER-147A (SEQ ID NO: 174), IgER-147G (SEQ ID NO: 175), IgER+17G (SEQ ID NO: 176), and IgER+17I (SEQ ID NO: 177). Resulting FCER1A-specific cathepsin B-sensitive VP64- (akt) or SID- (repS) containing transcription factors are IgER-147Aakt (SEQ ID NO: 178), IgER-147ArepS (SEQ ID NO: 179), IgER-147Gakt (SEQ ID NO: 180), IgER-147GrepS (SEQ ID NO: 181), IgER+17Gakt (SEQ ID NO: 182), IgER+17GrepS (SEQ ID NO: 183), IgER+171akt (SEQ ID NO: 184), and IgER+171repS (SEQ ID NO: 185). A cathepsin B non-sensitive artificial transcription factor is IgER-147ArepSNPS (SEQ ID NO: 186). An inactive version of IgER-147ArepS lacking all zinc coordinating cysteine residues for control purposes is IgER-147Amut_repS (SEQ ID NO: 187).

[0112] A TGFbR1-specific hexameric zinc finger protein is TGF-390A (SEQ ID NO: 188). Resulting TGFbR1-specific cathepsin B-sensitive VP64- (akt) or SID- (repS) containing transcription factors are TGF-390Aakt (SEQ ID NO: 189) and TGF-390repS (SEQ ID NO: 190).

[0113] In another embodiment, the artificial transcription factors targeting particular membrane-bound receptor gene promoters according to the invention comprise a zinc finger protein based on the zinc finger module composition of SEQ ID NO: 64 to 89, 144 to 147, 156 to 161, 174 to 177, and 188 wherein up to three, preferably one or two, individual zinc finger modules are exchanged against other zinc finger modules with alternative binding characteristic to modulate the binding of the artificial transcription factor to its target sequence, and/or wherein up to twelve, most preferably one or two individual amino acids are exchanged in order to minimize potential immunogenicity while retaining binding affinity to the intended target site.

[0114] In a particular embodiment, the artificial transcription factors targeting receptor gene promoters comprise a zinc finger protein based on the zinc finger module composition of SEQ ID NO: 64 to 89, 144 to 147, 156 to 161, 174 to 177, and 188, wherein optionally up to three, preferably one or two, individual zinc finger modules are exchanged against other zinc finger modules with alternative binding characteristic to modulate the binding of the artificial transcription factor to its target sequence and/or wherein optionally up to twelve, most preferably one or two individual amino acids are exchanged in order to minimize potential immunogenicity while retaining binding affinity to the intended target site, and wherein the transcription modulating domain is VP16, VP64, CJ7, p65-TA1, SAD, NF-1, AP-2, SP1-A, SP1-B, Oct-1, Oct-2, Oct2-5x, MTF-1, BTEB-2, LKLF, N-KRAB, C-KRAB, SID or ERD. More particularly the invention relates to such artificial transcription factors wherein the endosome-specific site is a cathepsin B cleavage site, and to such artificial transcription factors wherein the endosome-specific site is a cathespsin B cleavage site altered to minimize potential immunogenicity or cleavage specificity or efficiency.

### Transducible Artificial Transcription Factors Targeting Nuclear Receptor Promoter

[0115] Specific hexameric zinc finger proteins targeting specific target sites inside nuclear receptor promoters are composed of the Barbas zinc finger module set (Gonzalez B., 2010, Nat Protoc 5, 791-810) using the ZiFit software v3.3 (Sander J. D., Nucleic Acids Research 35, 599-605), or are selected using improved yeast one hybrid screening. To generate activating, cathepsin B-sensitive, transducible artificial transcription factors targeting the glucocorticoid receptor, hexameric zinc finger proteins proteins GR_ZFP1 (SEQ ID NO: 191), GR_ZFP2 (SEQ ID NO: 192), and GR_ZFP_{—}3 (SEQ ID NO: 193) are fused to the protein transduction domain TAT as well as the transcription activating domain VP64 yielding artificial transcription factors GR1akt (SEQ ID NO: 194), GR2akt (SEQ ID NO: 195) and GR3akt (SEQ ID NO: 196). To generate transducible cathepsin B-sensitive artificial transcription factors with negative regulatory activity, hexameric zinc finger proteins were fused to the protein transduction domain TAT as well as the transcription repressing domain SID yielding artificial transcription factors GR1rep (SEQ ID NO: 197), GR2rep (SEQ ID NO: 198) and GR3rep (SEQ ID NO: 199).

[0116] AR-specific hexameric zinc finger proteins are AR_ZFP1 (SEQ ID NO: 200), AR_ZFP2 (SEQ ID NO: 201), AR_ZFP3 (SEQ ID NO: 202), AR-236A (SEQ ID NO: 203), AR-236B (SEQ ID NO: 204), and AR-236C (SEQ ID NO: 205). Resulting AR-specific cathepsin B-sensitive VP64- (akt) or SID- (repS) containing artificial transcription factors are AR1akt (SEQ ID NO: 206), AR1repS (SEQ ID NO: 207), AR2akt (SEQ ID NO: 208), AR2repS (SEQ ID NO: 209), AR3akt (SEQ ID NO: 210), AR3repS (SEQ ID NO: 211), AR-236Aakt (SEQ ID NO: 212), AR-236ArepS (SEQ ID NO: 213), AR-236Bakt (SEQ ID NO: 214), AR-236BrepS (SEQ ID NO: 215), AR-236Cakt (SEQ ID NO: 216), and AR-236CrepS (SEQ ID NO: 217).

[0117] To generate activating transducible, cathepsin B-sensitive, artificial transcription factors targeting the estrogen receptor, hexameric zinc finger proteins ER_ZFP1 (SEQ ID NO: 218), ER_ZFP2 (SEQ ID NO: 219), and ER_ZFP_{—}3 (SEQ ID NO: 220) are fused to the protein transduction domain TAT as well as the transcription activating domain VP64 yielding artificial transcription factors ER1akt (SEQ ID NO: 221), ER2akt (SEQ ID NO: 222) and ER3akt (SEQ ID NO: 223). To generate transducible, cathepsin B-sensitive, artificial transcription factors with negative-regulatory activity, hexameric zinc finger proteins are fused to the protein transduction domain TAT as well as the transcription repressing domain SID yielding artificial transcription factors ER1rep (SEQ ID NO: 224), ER2rep (SEQ ID NO: 225) and ER3rep (SEQ ID NO: 226)

[0118] Considered are also artificial transcription factors of the invention containing pentameric, hexameric, heptameric or octameric zinc finger proteins, wherein individual zinc finger modules are exchanged to improve binding affinity towards target sites of the respective nuclear receptor promoter gene or to alter the immunological profile of the zinc finger protein for improved tolerability.

[0119] In another embodiment, the artificial transcription factors targeting particular nuclear receptor gene promoters according to the invention comprise a zinc finger protein based on the zinc finger module composition of SEQ ID NO: 191 to 193, 200 to 205, 218 to 220, wherein up to three, preferably one or two individual zinc finger modules are exchanged against other zinc finger modules with alternative binding characteristic to modulate the binding of the artificial transcription factor to its target sequence, and/or wherein up to twelve, for example twelve, eleven, ten or nine, in particular eight, seven, six or five, preferably four or three, most preferably one or two individual amino acids are exchanged in order to minimize potential immunogenicity while retaining binding affinity to the intended target site.

[0120] In a particular embodiment, the artificial transcription factors targeting nuclear receptor gene promoters comprise a zinc finger protein based on the zinc finger module composition of SEQ ID NO: 191 to 193, 200 to 205, 218 to 220, wherein optionally up to three, preferably one or two, individual zinc finger modules are exchanged against other zinc finger modules with alternative binding characteristic to modulate the binding of the artificial transcription factor to its target sequence, and/or wherein optionally up to twelve, most preferably one or two individual amino acids are exchanged in order to minimize potential immunogenicity while retaining binding affinity to the intended target site, and wherein the transcription modulating domain is VP16, VP64, CJ7, p65-TA1, SAD, NF-1, AP-2, SP1-A, SP1-B, Oct-1, Oct-2, Oct2-5x, MTF-1, BTEB-2, LKLF, N-KRAB, C-KRAB, SID or ERD. More particularly the invention relates to such artificial transcription factors, wherein the endosome-specific site is a cathepsin B cleavage site, and to such artificial transcription factors, wherein the endosome-specific site is a cathespsin B cleavage site altered to minimize potential immunogenicity or cleavage specificity or efficiency.

### Transducible Artificial Transcription Factors Targeting Haploinsufficient Gene Promoters

[0121] Specific hexameric zinc finger proteins are composed of the Barbas zinc finger module set (Gonzalez B., 2010, Nat Protoc 5, 791-810), using the ZiFit software v3.3 (Sander J. D., Nucleic Acids Research 35, 599-605) or are selected using improved yeast one hybrid screening.

[0122] OPA1-specific hexameric zinc finger proteins are OPA1_ZFP1 (SEQ ID NO: 227), OPA1_ZFP2 (SEQ ID NO: 228), OPA1-916B (SEQ ID NO: 229), OPA1-916C (SEQ ID NO: 230), OPA1-916D (SEQ ID NO: 231), OPA1-916E (SEQ ID NO: 232), OPA1-18B (SEQ ID NO: 233), OPA1-18C (SEQ ID NO: 234), OPA1-18D (SEQ ID NO: 235), OPA1-18E (SEQ ID NO: 236), OPA1-165A (SEQ ID NO: 237), OPA1-165B (SEQ ID NO: 238), OPA1-165C (SEQ ID NO: 239), OPA1-165D (SEQ ID NO: 240), OPA1-165E (SEQ ID NO: 241), OPA1-165F (SEQ ID NO: 242), OPA1-165G (SEQ ID NO: 243), and OPA1-165H (SEQ ID NO: 244). Corresponding OPA1-specific cathepsin B-sensitive artificial VP64-containing transcription factors are OPA_akt1 (SEQ ID NO: 245), OPA_akt2 (SEQ ID NO: 246), OPA1-916Bakt (SEQ ID NO: 247), OPA1-916Cakt (SEQ ID NO: 248), OPA1-916Dakt (SEQ ID NO: 249), OPA1-916Eakt (SEQ ID NO: 250), OPA1-18Bakt (SEQ ID NO: 251), OPA1-18Cakt (SEQ ID NO: 252), OPA1-18Dakt (SEQ ID NO: 253), OPA1-18Eakt (SEQ ID NO: 254), OPA1-165Aakt (SEQ ID NO: 255), OPA1-165Bakt (SEQ ID NO: 256), OPA1-165Cakt (SEQ ID NO: 257), OPA1-165Dakt (SEQ ID NO: 258), OPA1-165Eakt (SEQ ID NO: 259), OPA1-165Fakt (SEQ ID NO: 260), OPA1-165Gakt (SEQ ID NO: 261), and OPA1-165Hakt (SEQ ID NO: 262).

[0123] Considered are also artificial transcription factors of the invention containing pentameric, hexameric, heptameric or octameric zinc finger proteins, wherein individual zinc finger modules are exchanged to improve binding affinity towards target sites of the respective haploinsufficient promoter gene or to alter the immunological profile of the zinc finger protein for improved tolerability.

[0124] In another embodiment, the artificial transcription factors targeting haploinsufficient gene promoters according to the invention comprise a zinc finger protein based on the zinc finger module composition of SEQ ID NO: 227 and 244, wherein up to three, preferably one or two, individual zinc finger modules are exchanged against other zinc finger modules with alternative binding characteristic to modulate the binding of the artificial transcription factor to its target sequence, and/or, wherein up to up to twelve, most preferably one or two individual amino acids are exchanged in order to minimize potential immunogenicity while retaining binding affinity to the intended target site.

[0125] In a particular embodiment, the artificial transcription factors targeting haploinsufficient gene promoters comprise a zinc finger protein based on the zinc finger module composition of SEQ ID NO: 227 and 244, wherein optionally up to three, preferably one or two, individual zinc finger modules are exchanged against other zinc finger modules with alternative binding characteristic to modulate the binding of the artificial transcription factor to its target sequence and/or wherein optionally up to twelve, most preferably one or two individual amino acids are exchanged in order to minimize potential immunogenicity while retaining binding affinity to the intended target site, and wherein the transcription modulating domain is VP16, VP64, CJ7, p65-TA1, SAD, NF-1, AP-2, SP1-A, SP1-B, Oct-1, Oct-2, Oct2-5x, MTF-1, BTEB-2, LKLF, N-KRAB, C-KRAB, SID or ERD. More particularly the invention relates to such artificial transcription factors, wherein the endosome-specific site is a cathepsin B cleavage site, and to such artificial transcription factors, wherein the endosome-specific site is a cathespsin B cleavage site altered to minimize potential immunogenicity or cleavage specificity or efficiency.

### Activity of Artificial Transcription Factors in Regulating Receptor Promoter Activity

[0126] To assess the potential of artificial transcription factors to influence transcription driven by the receptor promoter, a luciferase reporter assay was employed (FIG. 2). To this end, HeLa cells capable of driving expression from the ETRA promoter were co-transfected with an artificial transcription factor expression plasmid together with a dual-reporter plasmid. The dual-reporter plasmid contained the secreted Gaussia luciferase gene under the control of the ETRA promoter together with the gene for secreted alkaline phosphatase (SEAP) under control of the constitutive CMV promoter based on the NEG-PG04 and EF1a-PG04 plasmids (GeneCopoeia, Rockville, Md.). This co-transfection was done in a 3:1 artificial transcription factor expression plasmid:reporter plasmid ratio to ensure the presence of artificial transcription factor expression in cells transfected with the reporter plasmid, and Gaussia luciferase, and SEAP activity was measured according to manufacturer's recommendation (Gaussia Luciferase Glow Assay Kit, Pierce; SEAP Reporter Gene Assay Chemiluminescence, Roche). Luciferase values were normalized to SEAP activity and compared to control cells expressing yellow fluorescent protein (YFP) set to 100%. By measuring the ratio between luciferase and SEAP activity in the supernatant of transfected cells, normalization of receptor promoter-driven luciferase expression to SEAP expression only in cells transfected with artificial transcription factor plasmid was possible. This approach proved useful to account and normalize for differences in transfection efficiency between different experiments and allowed for quantification of artificial transcription factor mediated regulation of a given receptor promoter. The luciferase expression studies were performed at least three times in triplicates, averaged, compared to control transfected cells, expressed as relative luciferase activity (RLuA) in % of control and plotted with error bars depicting SEM. Expression of AO74V suppressed ETRA promoter-driven expression to 3.2% compared to control cells.

### Accessibility of the ETRA_TS+74 Binding Site for the ETRA-Specific Artificial Transcription Factor AO74V in the Endogenous Gene.

[0127] In order to exert regulatory activity, artificial transcription factors need to be able to bind to their target site in the context of the endogenous genomic region. To analyze whether artificial transcription factors containing the ETRA+74V zinc finger protein (SEQ ID NO: 80) are capable of binding to their target site in the ETRA gene (ETRA_TS+74, SEQ ID NO: 41), stable cell lines containing an expression construct for AO74V under control of a tetracycline-inducible promoter were generated. Induction of these cells with tetracycline for 24 hours caused the production of AO74V protein (SEQ ID NO: 263), while no AO74V was produced in the absence of tetracycline. As shown in FIG. 3A, expression of AO74V caused the almost complete loss of ETRA mRNA in HEK 293 FlpIn cells compared to un-induced cells or cells expressing an inactive variant of AO74V lacking DNA binding capability or an empty vector control. While cells in FIG. 3A contained the expression constructs integrated into the FlpIn site, HEK 293 FlpIn TRex cells shown in FIG. 3B contained the tetracycline-inducible expression constructs in the AAVS1 safe harbor locus. Also in these cells, expression of AO74V but not of inactive AO74V caused the almost complete suppression of ETRA expression. Again using HeLa cells stably containing tetracycline-inducible expression constructs for AO74V, inactive AO74V or empty vector control in the AAVS1 locus (FIG. 3C), induction of AO74V but not of inactive AO74V using tetracycline did result in the strong suppression of ETRA expression. Taken together, the ETRA_TS+74 target site in the endogenous ETRA promoter is accessible for artificial transcription factors, and upon binding to this target site artificial transcription factors containing the SID negative-regulatory domain are in a position permissive for the suppression of ETRA expression.

### Assessment of ET-1 Dependent Calcium Signaling Following Expression of ETRA-Specific Artificial Transcription Factor

[0128] The ETRA agonist ET-1 stimulates calcium flux in HEK 293 FlpIn TRex cells. Therefore, suppression of ETRA expression is expected to suppress such changes in the intracellular calcium concentration following stimulation with ET-1. HEK 293 FlpIn TRex expressing AO74V (SEQ ID NO: 263 were induced with tetracycline for 48 hours and were treated with 0, 100, 1000 nM ET-1 and calcium flux was measured using a calcium-sensitive fluorescent dye (Calcium 5 Assay Kit, Molecular Devices) using an automated fluorescence plate reader (FlexStation 3, Molecular Devices). Cells not induced with tetracycline served as control. As shown in FIG. 4A, ET-1 is able to induce a concentration-dependent increase in intracellular calcium concentrations in cells not expressing the artificial transcription factor, while cells expressing the ETRA-specific artificial transcription factor no longer respond to ET-1 stimulation (FIG. 4B). These data are consistent with a loss of ETRA-dependent signaling due to a lack of ETRA protein following expression of this artificial transcription factor.

### Assessment of ET-1 Dependent Contraction of Human Uterine Smooth Muscle Cells Following Application of ETRA-Specific Artificial Transcription Factor

[0129] Smooth muscle cells (SMCs) express ETRA and are capable of contraction following exposure to ET-1. To measure the effectiveness of anti-ETRA promoter artificial transcription factor ETRA+74VrepSNPS (SEQ ID NO: 142), human uterine smooth muscle cells (hUtSMCs) were used as model system. To this end, hUtSMCs were embedded into 3-dimensional collagen lattices and treated for three days with 1 μM ETRA+74VrepSNPS or buffer control before exposure to 0 or 100 nM ET-1. The protein or buffer treatment was repeated every 24 hours. Following detachment of the lattices from their support and addition of ET-1, contraction of lattices was observed. As shown in FIG. 5, control lattices exposed to ET-1 contract to about 78% compared to lattices not treated with ET-1. In contrast, ETRA+74VrepSNPS treated lattices did not significantly contract in the presence of ET-1 when compared to control lattices not treated with ET-1. This is consistent with a complete block of ET-1 induced contraction of hUtSMCs following treatment with ETRA+74VrepNPS. The data shown in FIG. 4 represents the average lattice area 9 hours after ET-1 addition of three independent experiments done in sextuplicates. Statistical analysis using the SPSS software package employing a general linear univariate model revealed high significance (** represent p<0.001) for the blocking action of ETRA+74VrepNPS.

### Increased Nuclear Localization of Cathepsin B-Sensitive ETRA Specific Artificial Transcription Factor

[0130] To assess whether the addition of an endosome-specific protease cleavage site indeed improves the subcellular targeting of artificial transcription factors of the invention, HeLa cells were transduced with ETRA-specific artificial transcription factor protein

[0131] ETRA+74VrepSNPS(a variant of ETRA+74VrepS lacking the cathepsin B site containing the SID negative regulatory domain) or cathepsin B sensitive ETRA+74VrepS protein, and nuclear localization was analyzed by fluorescence microscopy followed by image analysis. As shown in FIG. 6, the incorporation of a cathepsin B cleavage site increased the mean concentration of artificial transcription factor in the nucleus 4.7 fold. Cells transduced with the cathepsin B-sensitive ETRA+74VrepS also showed a more uniform uptake of artificial transcription factor into the nucleus with 75% of cells reaching up to 47.5% of the maximal concentration, while 75% of cells transduced with the cathepsin B-insensitive ETRA+74VrepSNPS are below 10.4% of the maximal concentration. These data are consistent with a cathepsin B-dependent cleavage of ETRA+74VrepS in the endosomal compartment resulting in the separation of the TAT protein transduction domain from the remainder of the artificial transcription factor. This allows for the efficient escape from the endosomal compartment of the artificial transcription factor part of ETRA+74VrepS once stochastic vesicle rupture occurred.

### Inclusion of a Cathepsin B Site Increases Activity of Transducible Artificial Transcription Factor in a Luciferase Reporter Assay

[0132] As shown above, the cathepsin B-sensitive ETRA-specific artificial transcription factor ETRA+74VrepS localizes more efficiently to the nuclear compartment following protein transduction compared to the cathepsin B-insensitive ETRA+74VrepSNPS. To assess whether this improved nuclear localization translates into increased activity in terms of transcriptional regulation, a luciferase reporter assay was employed. To this end, HEK 293 cells containing a reporter construct consisting of Gaussia luciferase under the control of a hybrid CMV/ETRA_TS+74 promoter and secreted alkaline phosphatase were treated for 2 hours with 1 μM ETRA+74VrepS, ETRA+74VrepSNPS or an inactive version of ETRA+74VrepS as control, and luciferase and secreted alkaline phosphatase activity was measured 24 hours after treatment. As shown in FIG. 7, luciferase activity is decreased to 57.9+/−5.8% following treatment with ETRA+74VrepSNPS compared to control, while treatment with ETRA+74VrepS reduces luciferase activity to 87.2+/−8.2%. These data support the notion that increased nuclear localization of an artificial transcription factor due to increased cathepsin B-mediated endosomal escape translates into increased activity in terms of transcriptional regulation.

[0133] Similar results were obtained when comparing cathepsin B-sensitive artificial transcription factors targeting the TLR4, AR, or FcER1A promoter with the respective cathepsin B-insensitive variants using reporter cell lines containing luciferase under hybrid CMV promoters responsive to the respective artificial transcription factor. As shown in FIG. 8, treatment of suitable reporter cells with the cathepsin B-sensitive TLR4-222BrepS artificial transcription factor reduced relative luciferase activity to 61.3+/−6.9% compared to control treated cells, while treatment with the cathepsin B-insensitive TLR4-222BrepSNSP did not result in a suppression of luciferase activity. Similarly, treatment of suitable reporter cells with the cathepsin B-cleavable AR-236ArepS resulted in the reduction of relative luciferase activity to 52+/−11% compared to control, while treatment with AR-236ArepSNPS reduced luciferase activity only to 85+/−11% of control treated cells. Furthermore, treatment of suitable reporter cells with the cathepsin B-sensitive IgER-147ArepS caused a reduction of relative luciferase activity to 52.7+/−12.9% compared to control treated cells, while the corresponding cathepsin B-insensitive IgER-147ArepSNPS did not cause a reduction in luciferase activity compared to control cells. Taken together, the inclusion of a cathepsin B cleavage site into transducible artificial transcription factors greatly enhanced not only their correct nuclear localization but also their activity in terms of transcriptional regulation. Thus, separating the protein transduction domain with its high affinity for cellular membrane from the artificial transcription factor through the action of an endosomal protease allows for efficient exit of active artificial transcription factor following rupture of endosomal vesicles.

### An ETRA-Specific Cathepsin B-Sensitive Artificial Transcription Factor Shows Activity in Human Tissue

[0134] Suppression of ETRA expression through the action of an ETRA-specific artificial transcription factor is expected to interfere with endothelin-dependent, ETRA-mediated cellular signaling. Endothelin is the strongest known vasoconstrictor known, thus, downregulation of the endothelin receptor ETRA is predicted to block endothelin-dependent vasoconstriction. To assess whether ETRA+74VrepS is capable of influencing ETRA levels and thus block endothelin-dependent vasoconstriction, vasoconstriction of ex vivo human vessels treated with ETRA+74VrepS was measured. To this end, isolated human coronary artery vessel rings were incubated for three days in the presence of 1 μM ETRA+74VrepS. Incubation with vehicle served as control. To assess vessel contractibility, vessel rings were mounted into a wire myograph and vessel response to the ETRA-independent vasoconstrictor U46619 as well as increasing concentrations of endothelin was measured. As shown in FIG. 11, treatment with ETRA+74VrepS did reduce relative endothelin-dependent vessel contraction compared to vehicle treated control vessels. These data are consistent with the downregulation of ETRA gene expression resulting in the reduction of ETRA protein levels and a subsequent decrease in endothelin-dependent vasoconstriction in human coronary arteries through die action of ETRA+74VrepS.

[0135] The FCER1A-specific, cathepsin B-sensitive artificial transcription factor IgER-147ArepS shows activity in a humanized mouse model of anaphylactic shock.

[0136] Crosslinking IgE receptors on mast cells or basophiles through the binding of a multivalent antigen causes the release of allergic mediators such as histamine and others from these cells. In case of system activation of the process, e.g. following systemic exposure to an allergen, systemic release of histamine occurs, leading together with the other allergic mediators to anaphylactic shock. The anaphylactic shock is characterized by edema, a drop in blood pressure and hypothermia. To model anaphylaxis in animals, the following strategy is applied: Animals are sensitized through injection of a specific IgE antibody, for example raised against dinitrophenyl (DNP). The injected specific IgE now binds to IgE receptors on mast cells and basophiles priming these cells for the release of allergic mediators. To now activate these cells, DNP coupled to BSA in a high molar ratio is injected and leads upon binding to the crosslinking of IgE receptors through the bound specific anti-DNP IgE.

[0137] As IgER-147ArepS is targeting the FCER1A-promoter leading to a loss of IgE receptor, pretreatment with this artificial transcription factor will interfere with the induction of anaphylaxis, as the release of allergic mediators critically depends on the IgE receptor. To assess the activity of IgER-147ArepS in an in vivo model, a humanized mouse model (hNSG) was chosen, since this artificial transcription factor is selected against the human FCER1A promoter and is not expected to suppress expression from the murine FCER1A promoter. The hNSG model is based on the severely immune-compromised NSG mouse, which was implanted with human CD34+ stem cells capable of generating a quasi human immune system in a mouse. As shown in FIG. 12, hNSG mice pretreated twice with IgER-147ArepS artificial transcription factors at five days and two days prior to induction of anaphylaxis using anti-DNP IgE/DNP-BSA were less susceptible to anaphylactic shock compared to control animals. While anaphylaxis in vehicle treated control animals resulted in rapid death of the animal ten minutes post induction, IgER-147ArepS treated animals survived anaphylaxis for sixty minutes. These data are a clear indicator of suppression of anaphylaxis through diminished IgER activity following treatment with IgER-147ArepS.

### Attachment of a Polyethylene Glycol Residue

[0138] The covalent attachment of a polyethylene glycol residue (PEGylation) to an artificial transcription factor of the invention is considered to increase solubility of the artificial transcription factor, to decrease its renal clearance, and control its immunogenicity. Considered are amine as well as thiol reactive polyethylene glycols ranging in size from 1 to 40 Kilodalton. Using thiol reactive polyethylene glycols, site-specific PEGylation of the artificial transcription factors is achieved. The only essential thiol group containing amino acids in the artificial transcription factors of the invention are the cysteine residues located in the zinc finger modules essential for zinc coordination. These thiol groups are not accessible for PEGylation due their zinc coordination, thus, inclusion of one or several cysteine residues into the artificial transcription factors of the invention provides free thiol groups for PEGylation using thiol-specific polyethylene glycol reagents.

### Pharmaceutical Compositions

[0139] The present invention relates also to pharmaceutical compositions comprising an artificial transcription factor as defined above. Pharmaceutical compositions considered are compositions for parenteral systemic administration, in particular intravenous administration, compositions for inhalation, and compositions for local administration, in particular ophthalmic-topical administration, e.g. as eye drops, eye gels or sprays, or intravitreal, subconjunctival, parabulbar or retrobulbar administration, to warm-blooded animals, especially humans. Particularly preferred are eye drops and eye gels and compositions for intravitreal, subconjunctival, parabulbar or retrobulbar administration. The compositions comprise the active ingredient alone or, preferably, together with a pharmaceutically acceptable carrier. Further considered are slow-release formulations. The dosage of the active ingredient depends upon the disease to be treated and upon the species, its age, weight, and individual condition, the individual pharmacokinetic data, and the mode of administration.

[0140] Further considered are pharmaceutical compositions useful for oral delivery, in particular compositions comprising suitably encapsulated active ingredient, or otherwise protected against degradation in the gut. For example, such pharmaceutical compositions may contain a membrane permeability enhancing agent, a protease enzyme inhibitor, and be enveloped by an enteric coating.

[0141] The pharmaceutical compositions comprise from approximately 1% to approximately 95% active ingredient. Unit dose forms are, for example, ampoules, vials, inhalers, eye drops, eye gels and the like.

[0142] The pharmaceutical compositions of the present invention are prepared in a manner known per se, for example by means of conventional mixing, dissolving or lyophilizing processes.

[0143] Preference is given to the use of solutions of the active ingredient, and also suspensions or dispersions, especially isotonic aqueous solutions, dispersions or suspensions which, for example in the case of lyophilized compositions comprising the active ingredient alone or together with a carrier, for example mannitol, can be made up before use. The pharmaceutical compositions may be sterilized and/or may comprise excipients, for example preservatives, stabilizers, wetting agents and/or emulsifiers, solubilizers, salts for regulating osmotic pressure and/or buffers and are prepared in a manner known per se, for example by means of conventional dissolving and lyophilizing processes. The said solutions or suspensions may comprise viscosity-increasing agents, typically sodium carboxymethylcellulose, carboxymethylcellulose, dextran, polyvinylpyrrolidone, or gelatins, or also solubilizers, e.g. Tween 80™ (polyoxyethylene(20)sorbitan mono-oleate).

[0144] Suspensions in oil comprise as the oil component the vegetable, synthetic, or semi-synthetic oils customary for injection purposes. In respect of such, special mention may be made of liquid fatty acid esters that contain as the acid component a long-chained fatty acid having from 8 to 22, especially from 12 to 22, carbon atoms. The alcohol component of these fatty acid esters has a maximum of 6 carbon atoms and is a monovalent or polyvalent, for example a mono-, di- or trivalent, alcohol, especially glycol and glycerol. As mixtures of fatty acid esters, vegetable oils such as cottonseed oil, almond oil, olive oil, castor oil, sesame oil, soybean oil and groundnut oil are especially useful.

[0145] The manufacture of injectable preparations is usually carried out under sterile conditions, as is the filling, for example, into ampoules or vials, and the sealing of the containers.

[0146] For parenteral administration, aqueous solutions of the active ingredient in water-soluble form, for example of a water-soluble salt, or aqueous injection suspensions that contain viscosity-increasing substances, for example sodium carboxymethylcellulose, sorbitol and/or dextran, and, if desired, stabilizers, are especially suitable. The active ingredient, optionally together with excipients, can also be in the form of a lyophilizate and can be made into a solution before parenteral administration by the addition of suitable solvents.

[0147] Compositions for inhalation can be administered in aerosol form, as sprays, mist or in form of drops. Aerosols are prepared from solutions or suspensions that can be delivered with a metered-dose inhaler or nebulizer, i.e. a device that delivers a specific amount of medication to the airways or lungs using a suitable propellant, e.g. dichlorodifluoro-methane, trichlorofluoromethane, dichlorotetrafluoroethane, carbon dioxide or other suitable gas, in the form of a short burst of aerosolized medicine that is inhaled by the patient. It is also possible to provide powder sprays for inhalation with a suitable powder base such as lactose or starch.

[0148] Eye drops are preferably isotonic aqueous solutions of the active ingredient comprising suitable agents to render the composition isotonic with lacrimal fluid (295-305 mOsm/l). Agents considered are sodium chloride, citric acid, glycerol, sorbitol, mannitol, ethylene glycol, propylene glycol, dextrose, and the like. Furthermore the composition comprise buffering agents, for example phosphate buffer, phosphate-citrate buffer, or Tris buffer (tris(hydroxymethyl)-aminomethane) in order to maintain the pH between 5 and 8, preferably 7.0 to 7.4. The compositions may further contain antimicrobial preservatives, for example parabens, quaternary ammonium salts, such as benzalkonium chloride, polyhexamethylene biguanidine (PHMB) and the like. The eye drops may further contain xanthan gum to produce gel-like eye drops, and/or other viscosity enhancing agents, such as hyaluronic acid, methylcellulose, polyvinylalcohol, or polyvinylpyrrolidone.

### Use of Artificial Transcription Factors in a Method of Treatment

[0149] Furthermore the invention relates an artificial transcription factors directed to the endothelin receptor A promoter as described above for use in influencing the cellular response to endothelin, for lowering or increasing endothelin receptor levels, and for use in the treatment of diseases modulated by endothelin, in particular for use in the treatment of such eye diseases. Likewise the invention relates to a method of treating a disease modulated by endothelin comprising administering a therapeutically effective amount of an artificial transcription factor directed to the endothelin receptor A promoter to a patient in need thereof.

[0150] Diseases modulated by endothelin are, for example, cardiovascular diseases such as essential hypertension, pulmonary hypertension, chronic heart failure but also chronic renal failure. In addition, renal protection before, during and after radioopaque material application is achieved by blunting the endothelin response. In addition, multiple sclerosis is negatively impacted by the endothelin system.

[0151] Further diseases modulated by endothelin are diabetic kidney disease or eye diseases such as glaucomatous neurodegeneration, vascular dysregulation in ocular blood circulation, retinal vein occlusion, retinal artery occlusion, macular edema, age related macula degeneration, optic neuropathy, central serous chorioretinopathy, retinitis pigmentosa, Susac syndrome, and Leber's hereditary optic neuropathy.

[0152] Likewise the invention relates to a method of treating a disease modulated by endothelin comprising administering a therapeutically effective amount of an artificial transcription factor of the invention to a patient in need thereof. In particular the invention relates to a method of treating glaucomatous neurodegeneration, vascular dysregulation in ocular blood circulation, in particular to a method of treating retinal vein occlusion, retinal artery occlusion, macular edema, optic neuropathy, central serous chorioretinopathy, retinitis pigmentosa, and Leber's hereditary optic neuropathy, comprising administering an effective amount of an artificial transcription factor of the invention to a patient in need thereof. The effective amount of an artificial transcription factor of the invention depends upon the particular type of disease to be treated and upon the species, its age, weight, and individual condition, the individual pharmacokinetic data, and the mode of administration. For administration into the eye, a monthly vitreous injection of 0.5 to 1 mg is preferred. For systemic application, a monthly injection of 10 mg/kg is preferred. In addition, implantation of slow release deposits into the vitreous of the eye is also preferred.

[0153] Furthermore the invention relates to an artificial transcription factor directed to the endothelin receptor B promoter as described above for use in influencing the cellular response to endothelin, for lowering or increasing endothelin receptor B levels, and for use in the treatment of diseases modulated by endothelin, in particular for use in the treatment of such eye diseases. Likewise the invention relates to a method of treating a disease modulated by endothelin comprising administering a therapeutically effective amount of an artificial transcription factor directed to the endothelin receptor B promoter to a patient in need thereof.

[0154] Diseases modulated by ET-1-dependent, ETRB-mediated artificial transcription factors are certain cancers, neurodegeneration and inflammation-related disorders.

[0155] Furthermore the invention relates to an artificial transcription factor directed to the TLR4 promoter as described above for use in influencing the cellular response to LPS, for lowering or increasing TLR4 levels, and for use in the treatment of diseases modulated by LPS, in particular for use in the treatment of such eye diseases. Likewise the invention relates to a method of treating a disease modulated by LPS comprising administering a therapeutically effective amount of an artificial transcription factor directed to the TLR4 promoter to a patient in need thereof. Diseases modulated by LPS are rheumatoid arthritis, artherosclerosis, psoriasis, Crohn's disease, uveitis, contact lens associated keratitis, corneal inflammation, resistance of cancers to chemotherapy and the like.

[0156] Furthermore the invention relates to an artificial transcription factor directed to the FCER1A promoter as described above for use in influencing the cellular response to IgE or IgE-antigen complexes, for lowering or increasing FCER1 levels, and for use in the treatment of diseases modulated by IgE or IgE-antigen complexes, in particular for use in the treatment of such eye diseases.

[0157] Likewise the invention relates to a method of treating a disease modulated by IgE or IgE-antigen complexes comprising administering a therapeutically effective amount of an artificial transcription factor directed to the FCER1A promoter to a patient in need thereof. Diseases modulated by IgE or IgE-antigen complexes are in general type I reactions according to the Coombs and Gell classification (Gell P. and Coombs R. (eds), 1968, Clinical Aspects of Immunology, Blackwell Scientific, Oxford). Such reactions include allergic rhinitis, asthma, atopic dermatitis, pollen allergy, food allergy, hay fever, respiratory allergy, pet allergy, dust allergy, dust mite allergy, allergic uriticaria, allergic alveolitis, allergic aspergillosis, allergic bronchitis, allergic blepharitis, allergic contact dermatitis, allergic conjunctivitis, allergic fungal sinusitis, allergic gastroenteritis, allergic interstitial nephritis, allergic keratitis, allergic laryngitis, allergic purpura, allergic urethritis, allergic vasculitis, eczema, anaphylaxis and the like.

[0158] Furthermore, the invention relates an artificial transcription factor assembled as to target the promoter region of a nuclear receptor as described above for use in influencing the cellular response to the nuclear receptor ligand, for lowering or increasing the levels of the nuclear receptor, and for use in the treatment of diseases modulated by such nuclear receptors. Likewise, the invention relates to a method of treating diseases modulated by a nuclear receptor ligand comprising administering a therapeutically effective amount of an artificial transcription factor directed to a nuclear receptor promoter to a patient in need thereof.

[0159] Diseases modulated by ligands of nuclear receptors are, for example, adrenal insufficiency, adrenocortical insufficiency, alcoholism, Alzheimer's disease, androgen insensitivity syndrome, anorexia nervosa, aortic aneurysm, aortic valve sclerosis, arthritis, asthma, atherosclerosis, attention deficit hyperactivity disorder, autism, azoospermia, biliary primary cirrhosis, bipolar disorder, bladder cancer, bone cancer, breast cancer, cardiovascular disease, cardiovascular myocardial infarction, celiac disease, cholestasis, chronic kidney failure and metabolic syndrome, cirrhosis, cleft palate, colorectal cancer, congenital adrenal hypoplasia, coronary heart disease, cryptorchidism, deep vein thrombosis, dementia, depression, diabetic retinopathy, endometriosis, endometrial cancer, enhanced S-cone syndrome, essential hypertension, familial partial lipodystrophy, glioblastoma, glucocorticoid resistance, Graves' Disease, high serum lipid levels, hyperapobetalipoproteinemia, hyperlipidemia, hypertension, hypertriglyceridemia, hypogonadotropic hypogonadism, hypospadias, infertility, inflammatory bowel disease, insulin resistance, ischemic heart disease, liver steatosis, lung cancer, lupus erythematosus, major depressive disorder, male breast cancer, metabolic plasma lipid levels, metabolic syndrome, migraine, mulitple sclerosis, myocardial infarct, nephrotic syndrome, non-Hodgkin's lymphoma, obesity, osteoarthritis, osteopenia, osteoporosis, ovarian cancer, Parkinson's disease, preeclampsia, progesterone resistance, prostate cancer, pseudohypoaldosteronism, psoriasis, psychiatric schizophrenia, psychosis, retinitis pigmentosa-37, schizophrenia, sclerosing cholangitis, sex reversal, skin cancer, spinal and bulbar atrophy of Kennedy, susceptibility to myocardial infarction, susceptibility to psoriasis, testicular cancer, type I diabetes, type II diabetes, uterine cancer and vertigo.

[0160] Likewise, the invention relates to a method of treating a disease modulated by ligands of nuclear receptors comprising administering a therapeutically effective amount of an artificial transcription factor of the invention to a patient in need thereof. In particular, the invention relates to a method of treating adrenal insufficiency, adrenocortical insufficiency, alcoholism, Alzheimer's disease, androgen insensitivity syndrome, anorexia nervosa, aortic aneurysm, aortic valve sclerosis, arthritis, asthma, atherosclerosis, attention deficit hyperactivity disorder, autism, azoospermia, biliary primary cirrhosis, bipolar disorder, bladder cancer, bone cancer, breast cancer, cardiovascular disease, cardiovascular myocardial infarction, celiac disease, cholestasis, chronic kidney failure and metabolic syndrome, cirrhosis, cleft palate, colorectal cancer, congenital adrenal hypoplasia, coronary heart disease, cryptorchidism, deep vein thrombosis, dementia, depression, diabetic retinopathy, endometriosis, endometrial cancer, enhanced S-cone syndrome, essential hypertension, familial partial lipodystrophy, glioblastoma, glucocorticoid resistance, Graves' Disease, high serum lipid levels, hyperapobetalipoproteinemia, hyperlipidemia, hypertension, hypertriglyceridemia, hypogonadotropic hypogonadism, hypospadias, infertility, inflammatory bowel disease, insulin resistance, ischemic heart disease, liver steatosis, lung cancer, lupus erythematosus, major depressive disorder, male breast cancer, metabolic plasma lipid levels, metabolic syndrome, migraine, mulitple sclerosis, myocardial infarct, nephrotic syndrome, non-Hodgkin's lymphoma, obesity, osteoarthritis, osteopenia, osteoporosis, ovarian cancer, Parkinson's disease, preeclampsia, progesterone resistance, prostate cancer, pseudohypoaldosteronism, psoriasis, psychiatric schizophrenia, psychosis, retinitis pigmentosa-37, schizophrenia, sclerosing cholangitis, sex reversal, skin cancer, spinal and bulbar atrophy of Kennedy, susceptibility to myocardial infarction, susceptibility to psoriasis, testicular cancer, type I diabetes, type II diabetes, uterine cancer and vertigo, comprising administering an effective amount of an artificial transcription factor of the invention to a patient in need thereof. The effective amount of an artificial transcription factor of the invention depends upon the particular type of disease to be treated and upon the species, its age, weight, and individual condition, the individual pharmacokinetic data, and the mode of administration. For administration into the eye, a monthly vitreous injection of 0.5 to 1 mg is preferred. For systemic application, a monthly injection of 10 mg/kg is preferred. In addition, implantation of slow release deposits into the vitreous of the eye is also preferred.

[0161] Furthermore, the invention relates an artificial transcription factor directed to the glucocorticoid receptor as described above for use in influencing the cellular response to ligands of the glucocorticoid receptor, for lowering or increasing glucocorticoid receptor levels, and for the use in the treatment of diseases modulated by ligands of the glucocorticoid receptor.

[0162] Likewise the invention relates to a method of treating a disease modulated by ligands of the glucocorticoid receptor comprising administering a therapeutically effective amount of an artificial transcription factor of the invention to a patient in need thereof. Diseases considered are glucocorticoid resistance, type II diabetes, obesity, coronary atherosclerosis, coronary artery disease, asthma, celiac disease, lupus erythematosus, depression, stress and nephrotic syndrome. The effective amount of an artificial transcription factor of the invention depends upon the particular type of disease to be treated and upon the species, its age, weight, and individual condition, the individual pharmacokinetic data, and the mode of administration. For administration into the eye, a monthly vitreous injection of 0.5 to 1 mg is preferred. For systemic application, a monthly injection of 10 mg/kg is preferred. In addition, implantation of slow release deposits into the vitreous of the eye is also preferred.

[0163] Furthermore, the invention relates an artificial transcription factor directed to the androgen receptor as described above for use in influencing the cellular response to ligands of the androgen receptor, for lowering or increasing androgen receptor levels, and for the use in the treatment of diseases modulated by ligands of the androgen receptor.

[0164] Likewise the invention relates to a method of treating a disease modulated by ligands of the androgen receptor comprising administering a therapeutically effective amount of an artificial transcription factor of the invention to a patient in need thereof. Diseases considered are prostate cancer, male breast cancer, ovarian cancer, colorectal cancer, endometrial cancer, testicular cancer, coronary artery disease, type I diabetes, diabetic retinopathy, obesity, androgen insensitivity syndrome, osteoporosis, osteoarthritis, type II diabetes, Alzheimer's disease, migraine, attention deficit hyperactivity disorder, depression, schizophrenia, azoospermia, endometriosis, and spinal and bulbar atrophy of Kennedy. The effective amount of an artificial transcription factor of the invention depends upon the particular type of disease to be treated and upon the species, its age, weight, and individual condition, the individual pharmacokinetic data, and the mode of administration. For administration into the eye, a monthly vitreous injection of 0.5 to 1 mg is preferred. For systemic application, a monthly injection of 10 mg/kg is preferred. In addition, implantation of slow release deposits into the vitreous of the eye is also preferred.

[0165] Furthermore, the invention relates an artificial transcription factor directed to the estrogen receptor as described above for use in influencing the cellular response to ligands of the estrogen receptor, for lowering or increasing estrogen receptor levels, and for the use in the treatment of diseases modulated by ligands of the estrogen receptor.

[0166] Likewise the invention relates to a method of treating a disease modulated by ligands of the estrogen receptor comprising administering a therapeutically effective amount of an artificial transcription factor of the invention to a patient in need thereof. Diseases considered are bone cancer, breast cancer, colorectal cancer, endometrial cancer, prostate cancer uterine cancer, alcoholism, migraine, aortic aneurysm, susceptibility to myocardial infarction, aortic valve sclerosis, cardiovascular disease, coronary artery disease, hypertension, deep vein thrombosis, Graves' Disease, arthritis, mulitple sclerosis, cirrhosis, hepatitis B, chronic liver disease, cholestasis, hypospadias, obesity, osteoarthritis, osteopenia, osteoporosis, Alzheimer's disease, Parkinson's disease, migraine, vertigo), anorexia nervosa, attention deficit hyperactivity disorder, dementia, depression, psychosis, endometriosis and infertility. The effective amount of an artificial transcription factor of the invention depends upon the particular type of disease to be treated and upon the species, its age, weight, and individual condition, the individual pharmacokinetic data, and the mode of administration. For administration into the eye, a monthly vitreous injection of 0.5 to 1 mg is preferred. For systemic application, a monthly injection of 10 mg/kg is preferred. In addition, implantation of slow release deposits into the vitreous of the eye is also preferred.

[0167] Furthermore, the invention relates an artificial transcription factor assembled as to target the promoter region of a haploinsufficient gene as described above for use in restoring gene production to physiological levels in order to alleviate pathological phenotypes caused by insufficient gene production expression. Likewise, the invention relates to a method of treating diseases caused or modulated by haploinsufficiency comprising administering a therapeutically effective amount of an artificial transcription factor directed to a haploinsufficient gene promoter.

[0168] Diseases considered in the present invention are Leri-Weill dyschondrosteosis, frontotemporal lobar degeneration with TDP43 inclusions, Kleefstra syndrome, Digeorge syndrome, neurofibromatosis type I, Pitt-Hopkins syndrome, mandibulofacial dysostosis with microcephaly, Williams-Beuren syndrome, autosomal dominant Ehlers-Danlos syndrome type Iv, dopa-responsive dystonia due to sepiapterin reductase deficiency, oculocutaneous albinism type II, Smith-Magenis syndrome, hypoparathyroidism, sensorineural deafness and renal disease (Hdr), Stickler syndrome type I, Mowat-Wilson syndrome, syndromic Microphthalmia 3, Ehlers-Danlos syndrome type III, aniridia, pseudohypoparathyroidism type Ia, early infantile epileptic encephalopathy 4, skin fragility-woolly hair syndrome, Miller-Dieker lissencephaly syndrome, Wolf-Hirschhorn syndrome, trichorhinophalangeal syndrome type I, otodental dysplasia, otodental syndrome with coloboma, myotonic dystrophy 1, Treacher-Collins syndrome 1, familial acne inverse 1, Ehlers-Danlos syndrome type I, brachydactyly-mental retardation syndrome, velocardiofacial syndrome, Ulnar-Mammary syndrome, campomelic dysplasia, early infantile epileptic encephalopathy 5, Koolen-De Vries syndrome, holoprosencephaly 5, syndromic microphthalmia 6, Dravet syndrome, Glut1 deficiency syndrome 1, neurodegeneration with brain iron accumulation 3, autosomal recessive juvenile Parkinson disease 2, synpolydactyly 1, supravalvular aortic stenosis, dominant optic atrophy 1, Carney complex type 1, Pallister-Hall syndrome, Holt-Oram syndrome, alpha-thalassemia/mental retardation syndrome, seizures, benign familial neonatal 1, alagille syndrome 1, brachydactyly type C, familial platelet disorder with associated myeloid malignancy, pancreatic agenesis and congenital heart defects, telomere-related pulmonary fibrosis and/or bone marrow failure 1, mirror movements 2, speech-language disorder 1, autosomal dominant deafness 9, Kenny-Caffey syndrome type 1, ataxia-telangiectasia, parietal foramina, Feingold syndrome 1, nail-patella syndrome, autosomal dominant mental retardation 1, holoprosencephaly 3, congenital clubfoot with or without deficiency of long bones and/or mirror-image polydactyly, Sotos syndrome 1, Loeys-Dietz syndrome type 4, idiopathic basal ganglia calcification 3, trigonocephaly 2, centronuclear myopathy 3, cognitive impairment with or without cerebellar ataxia, familial partial lipodystrophy type 4, mononeuropathy of the median nerve, Waardenburg syndrome type 4c, Waardenburg syndrome type 4b, atypical hemolytic uremic syndrome 5, autosomal dominant spastic paraplegia 42, pseudohypoparathyroidism, autosomal dominant spastic paraplegia 31, autosomal dominant progressive external ophthalmoplegia with mitochondrial DNA deletions 4, spinocerebellar ataxia 27, Charcot-Marie-tooth disease type 2a2, autosomal dominant auditory neuropathy 1, synpolydactyly 2, limb-girdle muscular dystrophy type 1c, lissencephaly 1, spinocerebellar ataxia 15, Ehlers-Danlos-like syndrome, hereditary motor and sensory neuropathy typellc, hairy elbows with short stature facial dysmorphism and developmental delay, Axenfeld-Rieger syndrome type 3, familial infantile convulsions with paroxysmal choreoathetosis, acute myeloid leukemia, Charcot-Marie-tooth disease type 2d, congenital cataracts with sensorineural deafness, Down syndrome-like facial appearance with short stature and mental retardation, autosomal dominant deafness 5, hyperferritinemia with or without cataract, oblique facial clefting 1, autosomal dominant deafness 2a, early infantile epileptic encephalopathy 1, susceptibility to autism X-Linked 2, Usher syndrome type IIIa, thrombocytopenia-absent radius syndrome, autosomal recessive Robinow syndrome, alveolar capillary dysplasia with misalignment of pulmonary veins, pseudoxanthoma elasticum, familial hyper-insulinemic hypoglycemia 1, Ullrich congenital muscular dystrophy, iminoglycinuria, Charge syndrome, Wilms Tumor, aniridia, genitourinary anomalies and mental retardation syndrome, tetralogy of Fallot, autosomal dominant spastic paraplegia 4, familial progressive scleroderma, Crest syndrome, autosomal dominant Emery-Dreifuss muscular dystrophy 2, aplasia of lacrimal and salivary glands, retinoblastoma, Dowling-Degos disease, primary pulmonary hypertension 1, Currarino syndrome, sacral agenesis syndrome, Prader-Willi syndrome, Greig cephalopolysyndactyly syndrome, juvenile polyposis/hereditary hemorrhagic telangiectasia syndrome, Piebald trait, limb-girdle muscular dystrophy type 1b, Bethlem myopathy, Cowden disease, Marfan syndrome, renal hypomagnesemia 2, microcephaly with or without chorioretinopathy, lymphedema or mental retardation tylosis with esophageal cancer, Kabuki syndrome 1, Jacobsen syndrome, diaphragmatic hernia, congenital Hashimoto thyroiditis, open angle glaucoma 1, Beckwith-Wiedemann syndrome, dopa-responsive dystonia, episodic kinesigenic dyskinesia 1, primary failure of tooth eruption, Darier-White disease, autosomal dominant cutis laxa 1, Cornelia De Lange syndrome 1, cleidocranial dysplasia, orofacial cleft 1, Van Der Woude syndrome 1, cherubism, cerebral cavernous malformations, familial hypertrophic cardiomyopathy 4, cardiofaciocutaneous syndrome, brachydactyly type D, basal cell nevus syndrome, achondroplasia, parietal foramina 2, Potocki-Shaffer syndrome, autosomal dominant congenital dyskeratosis 2, mental retardation with language impairment and autistic features, autosomal dominant anhidrotic ectodermal dysplasia with T-cell immunodeficiency, corticosteroid-binding globulin deficiency, choreoathetosis, hypothyroidism and neonatal respiratory distress, primary coenzyme Q10 deficiency 1, Duane-Radial Ray syndrome, familial hemiplegic migraine 2, mirror movements 1, Nager type acrofacial dysostosis 1, palmoplantar keratoderma punctate type Ia, and hypogonadotropic hypogonadism with or without anosmia 2.

[0169] Furthermore the invention relates to artificial transcription factors directed to the OPA1 promoter as described above for use of increasing OPA1 production, and for use in the treatment of diseases influenced by OPA1, in particular for use in the treatment of such eye diseases. Diseases modulated by OPA1 are autosomal dominant optic atrophy, autosomal dominant optic atrophy plus, as well as normal tension glaucoma.

[0170] Likewise the invention relates to a method of treating a disease influenced by OPA1 comprising administering a therapeutically effective amount of an artificial transcription factor of the invention to a patient in need thereof. In particular the invention relates to a method of treating neurodegeneration associated with normal tension glaucoma or dominant optic atrophy. The effective amount of an artificial transcription factor of the invention depends upon the particular type of disease to be treated and upon the species, its age, weight, and individual condition, the individual pharmacokinetic data, and the mode of administration. For administration into the eye, a monthly vitreous injection of 0.5 to 1 mg is preferred. For systemic application, a monthly injection of 10 mg/kg is preferred. In addition, implantation of slow release deposits into the vitreous of the eye is also preferred.

[0171] Furthermore the invention relates to artificial transcription factors directed to the the TGFbR1 promoter as described above for use of increasing or decreasing TGFbR1 production, and for use in the treatment of pathological processes influenced by TGFbR1, in particular of use in the treatment of such pathological processes in the eye. Pathological processes modulated by TGFbR1 are mal-adapted wound healing following eye surgery.

[0172] Likewise the invention relates to a method of treating a disease influenced by TGFBR1 comprising administering a therapeutically effective amount of an artificial transcription factor of the invention to a patient in need thereof. In particular the invention relates to a method of treating neurodegeneration associated with normal tension glaucoma or dominant optic atrophy. The effective amount of an artificial transcription factor of the invention depends upon the particular type of disease to be treated and upon the species, its age, weight, and individual condition, the individual pharmacokinetic data, and the mode of administration. For administration into the eye, a monthly vitreous injection of 0.5 to 1 mg is preferred. For systemic application, a monthly injection of 10 mg/kg is preferred. In addition, implantation of slow release deposits into the vitreous of the eye is also preferred.

### Use of Artificial Transcription Factors in Plants

[0173] Furthermore the invention relates to the use of artificial transcription factors targeting plant promoters to improve gene product generation. Preferably, DNA encoding the artificial transcription factors is cloned into vectors for transformation of plant-colonizing microorganisms or plants. Alternatively, the artificial transcription factors are directly applied in suitable compositions for topical applications to plants.

### Use of Artificial Transcription Factors in Non-Human Animals

[0174] Furthermore the invention relates to the use of artificial transcription factors targeting non-human animal promoters, haploinsufficient, to enhance gene product generation. Preferably, the artificial transcription factors are directly applied in suitable compositions for topical applications to non-human animals in need thereof.

### Examples

### Cloning of DNA Plasmids

[0175] For all cloning steps, restriction endonucleases and T4 DNA ligase are purchased from New England Biolabs. Shrimp Alkaline Phosphatase (SAP) is from Promega. The high-fidelity Platinum Pfx DNA polymerase (Invitrogen) is applied in all standard PCR reactions. DNA fragments and plasmids are isolated according to the manufacturer's instructions using NucleoSpin Gel and PCR Clean-up kit, NucleoSpin Plasmid kit, or NucleoBond Xtra Midi Plus kit (Macherey-Nagel). Oligonucleotides are purchased from Sigma-Aldrich. All relevant DNA sequences of newly generated plasmids were verified by sequencing (Microsynth).

### Cloning of Hexameric Zinc Finger Protein Libraries for Yeast One Hybrid

[0176] Hexameric zinc finger protein libraries containing GNN and/or CNN and/or ANN binding zinc finger (ZF) modules are cloned according to Gonzalez B. et al, 2010, Nat Protoc 5, 791-810 with the following improvements. DNA sequences coding for GNN, CNN and ANN ZF modules were synthesized and inserted into pUC57 (GenScript) resulting in pAN1049 (SEQ ID NO: 264), pAN1073 (SEQ ID NO: 265) and pAN1670 (SEQ ID NO: 266), respectively. Stepwise assembly of zinc finger protein (ZFP) libraries is done in pBluescript SK (+) vector. To avoid insertion of multiple ZF modules during each individual cloning step leading to non-functional proteins, pBluescript (and its derived products containing 1ZFP, 2ZFPs, or 3ZFPs) and pAN1049, pAN1073 or pAN1670 are first incubated with one restriction enzyme and afterwards treated with SAP. Enzymes are removed using NucleoSpin Gel and PCR Clean-up kit before the second restriction endonuclease is added.

[0177] Cloning of pBluescript-1ZFPL is done by treating 5 μg pBluescript with XhoI, SAP and subsequently SpeI. Inserts are generated by incubating 10 μg pAN1049 (release of 16 different GNN ZF modules) or pAN1073 (release of 15 different CNN ZF modules) or pAN1670 (release of 15 different ANN ZF modules) with SpeI, SAP and subsequently XhoI. For generation of pBluescript-2ZFPL and pBluescript-3ZFPL, 7 μg pBluescript-1ZFPL or pBluescript-2ZFPL are cut with AgeI, dephosphorylated, and cut with SpeI. Inserts are obtained by applying SpeI, SAP, and subsequently XmaI to 10 μg pAN1049 or pAN1073 or pAN1670, respectively. Cloning of pBluescript-6ZFPL was done by treating 14 μg of pBluescript-3ZFPL with AgeI, SAP, and thereafter SpeI to obtain cut vectors. 3ZFPL inserts were released from 20 μg of pBluescript-3ZFPL by incubating with SpeI, SAP, and subsequently XmaI.

[0178] Ligation reactions for libraries containing one, two, and three ZFPs were set up in a 3:1 molar ratio of insert:vector using 200 ng cut vector, 400 U T4 DNA ligase in 20 μl total volume at RT (room temperature) overnight. Ligation reactions of hexameric zinc finger protein libraries included 2000 ng pBluescript-3ZFPL, 500 ng 3ZFPL insert, 4000 U T4 DNA ligase in 200 μl total volume, which were divided into ten times 20 μl and incubated separately at RT overnight. Portions of ligation reactions were transformed into Escherichia coli by several methods depending on the number of clones required for each library. For generation of pBluescript-1ZFPL and pBluescript-2ZFPL, 3 μl of ligation reaction were directly used for heat shock transformation of E. coli NEB 5-alpha. Plasmid DNA of ligation reactions of pBluescript-3ZFPL was purified using NucleoSpin Gel and PCR Clean-up kit and transformed into electrocompetent E. coli NEB 5-alpha (EasyjecT Plus electroporator from EquiBio or Multiporator from Eppendorf, 2.5 kV and 25 μF, 2 mm electroporation cuvettes from Bio-Rad). Ligation reactions of pBluescript-6ZFP libraries were applied to NucleoSpin Gel and PCR Clean-up kit and DNA was eluted in 15 μl of deionized water. About 60 ng of desalted DNA were mixed with 50 μl NEB 10-beta electrocompetent E. coli (New England Biolabs) and electroporation was performed as recommended by the manufacturer using EasyjecT Plus or Multiporator, 2.5 kV, 25 μF and 2 mm electroporation cuvettes. Multiple electroporations were performed for each library and cells were directly pooled afterwards to increase library size. After heat shock transformation or electroporation, SOC medium was applied to the bacteria and after 1 h of incubation at 37° C. and 250 rpm, 30 μl of SOC culture were used for serial dilutions and plating on LB plates containing ampicillin. The next day, total number of obtained library clones was determined. In addition, ten clones of each library were chosen to isolate plasmid DNA and to check incorporation of inserts by restriction enzyme digestion. At least three of these plasmids were sequenced to verify diversity of the library. The remaining SOC culture was transferred to 100 ml LB medium containing ampicillin and cultured overnight at 37° C. and 250 rpm. Those cells were used to prepare plasmid Midi DNA for each library.

[0179] For yeast one hybrid screens, hexameric zinc finger protein libraries are transferred to a compatible prey vector. For that purpose, the multiple cloning site of pGAD10 (Clontech) was modified by cutting the vector with XhoI/EcoRI and inserting annealed oligonucleotides OAN971 (TCGACAGGCCCAGGCGGCCCTCGAGGATATCATGATG ACTAGTGGCCAGGCCGGCCC, SEQ ID NO: 267) and OAN972 (AATTGGGCCGGC CTGGCCACTAGTCATCATGATATCCTCGAGGGCCGCCTGGGCCTG, SEQ ID NO: 268). The resulting vector pAN1025 (SEQ ID NO: 269) was cut and dephosphorylated, 6ZFP library inserts were released from pBluescript-6ZFPL by XhoI/SpeI. Ligation reactions and electroporations into NEB 10-beta electrocompetent E. coli were done as described above for pBluescript-6ZFP libraries.

[0180] For improved yeast one hybrid screening, hexameric zinc finger libraries are also transferred into an improved prey vector pAN1375 (SEQ ID NO: 270). This prey vector was constructed as follows: pRS315 (SEQ ID NO: 271) was cut ApaI/NarI and annealed OAN1143 (CGCCGCATGCATTCATGCAGGCC, SEQ ID NO: 272) and OAN1144 (TGCATGAATGCATGCGG, SEQ ID NO: 273) were inserted yielding pAN1373 (SEQ ID NO: 274). A SphI insert from pAN1025 was ligated into pAN1373 cut with SphI to obtain pAN1375.

[0181] For further improved yeast one hybrid screening, hexameric zinc finger libraries are also transferred into an improved prey vector pAN1920 (SEQ ID NO: 275).

[0182] For even further improved yeast one hybrid screening, hexameric zinc finger libraries are inserted into prey vector pAN1992 (SEQ ID NO: 276).

### Cloning of Bait Plasmids for Yeast One Hybrid Screening

[0183] For each bait plasmid, a 60 bp sequence containing a potential artificial transcription factor target site of 18 bp in the center is selected and a NcoI site is included for restriction analysis. Oligonucleotides are designed and annealed in such a way to produce 5′ HindIII and 3′ XhoI sites which allowed direct ligation into pAbAi (Clontech) cut with HindIII/XhoI. Digestion of the product with NcoI and sequencing are used to confirm assembly of the bait plasmid.

### Yeast Strain and Media

[0184] Saccharomyces cerevisiae Y1H Gold was purchased from Clontech, YPD medium and YPD agar from Carl Roth. Synthetic drop-out (SD) medium contained 20 g/l glucose, 6.8 g/l Na₂HPO₄.2H₂O, 9.7 g/l NaH₂PO₄.2H₂O (all from Carl Roth), 1.4 g/l yeast synthetic drop-out medium supplements, 6.7 g/l yeast nitrogen base, 0.1 g/l L-tryptophan, 0.1 g/l L-leucine, 0.05 g/l L-adenine, 0.05 g/l L-histidine, 0.05 g/l uracil (all from Sigma-Aldrich). SD-U medium contained all components except uracil, SD-L was prepared without L-leucine. SD agar plates did not contain sodium phosphate, but 16 g/l Bacto Agar (BD). Aureobasidin A (AbA) was purchased from Clontech.

### Preparation of Bait Yeast Strains

[0185] About 5 μg of each bait plasmid are linearized with BstBI in a total volume of 20 μl and half of the reaction mix is directly used for heat shock transformation of S. cerevisiae Y1H Gold. Yeast cells are used to inoculate 5 ml YPD medium the day before transformation and grown overnight on a roller at RT. One milliliter of this pre-culture is diluted 1:20 with fresh YPD medium and incubated at 30° C., 225 rpm for 2-3 h. For each transformation reaction 1 OD₆₀₀ cells are harvested by centrifugation, yeast cells are washed once with 1 ml sterile water and once with 1 ml TE/LiAc (10 mM Tris/HCl, pH 7.5, 1 mM EDTA, 100 mM lithium acetate). Finally, yeast cells are resuspended in 50 μl TE/LiAc and mixed with 50 μg single stranded DNA from salmon testes (Sigma-Aldrich), 10 μl of BstBI-linearized bait plasmid (see above), and 300 μl PEG/TE/LiAc (10 mM Tris/HCl, pH 7.5, 1 mM EDTA, 100 mM lithium acetate, 50% (w/v) PEG 3350). Cells and DNA are incubated on a roller for 20 min at RT, afterwards placed into a 42° C. water bath for 15 min. Finally, yeast cells are collected by centrifugation, resuspended in 100 μl sterile water and spread onto SD-U agar plates. After 3 days of incubation at 30° C. eight clones growing on SD-U from each transformation reaction are chosen to analyze their sensitivity towards aureobasidin A (AbA). Pre-cultures were grown overnight on a roller at RT. For each culture, OD₆₀₀ was measured and OD₆₀₀=0.3 was adjusted with sterile water. From this first dilution five additional 1:10 dilution steps were prepared with sterile water. For each clone 5 μl from each dilution step were spotted onto agar plates containing SD-U, SD-U 100 ng/ml AbA, SD-U 150 ng/ml AbA, and SD-U 200 ng/ml AbA. After incubation for 3 days at 30° C., three clones growing well on SD-U and being most sensitive to AbA are chosen for further analysis. Stable integration of bait plasmid into yeast genome is verified by Matchmaker Insert Check PCR Mix 1 (Clontech) according to the manufacturer's instructions. One of three clones is used for subsequent Y1H screen.

Transformation of Bait Yeast Strain with Hexameric Zinc Finger Protein Library

[0186] About 500 μl of yeast bait strain pre-culture are diluted into 1 I YPD medium and incubated at 30° C. and 225 rpm until OD₆₀₀=1.6-2.0 (circa 20 h). Cells are collected by centrifugation in a swing-out rotor (5 min, 1500×g, 4° C.). Preparation of electrocompetent cells is done according to Benatuil L. et al., 2010, Protein Eng Des Sel 23, 155-159. For each transformation reaction, 400 μl electrocompetent bait yeast cells are mixed with 1 μg prey plasmids encoding 6ZFP libraries and incubated on ice for 3 min. The cell-DNA suspension is transferred to a pre-chilled 2 mm electroporation cuvette. Multiple electroporation reactions (EasyjecT Plus electroporator or Multiporator, 2.5 kV and 25 μF) are performed until all yeast cell suspension has been transformed. After electroporation yeast cells are transferred to 100 ml of 1:1 mix of YPD:1 M sorbitol and incubated at 30° C. and 225 rpm for 60 min. Cells are collected by centrifugation and resuspended in 1-2 ml of SD-L medium. Aliquots of 200 μl are spread on 15 cm SD-L agar plates containing 1000-4000 ng/ml AbA. In addition, 50 μl of cell suspension are used to make 1/100 and 1/1000 dilutions and 50 μl of undiluted and diluted cells are plated on SD-L. All plates are incubated at 30° C. for 3 days. The total number of obtained clones is calculated from plates with diluted transformants. While SD-L plates with undiluted cells indicate growth of all transformants, AbA-containing SD-L plates only resulted in colony formation if the prey 6ZFP bound to its bait target site successfully.

### Verification of Positive Interactions and Recovery of 6ZFP-Encoding Prey Plasmids

[0187] For initial analysis, forty good-sized colonies are picked from SD-L plates containing the highest AbA concentration and yeast cells were restreaked twice on SD-L with 1000-4000 ng/ml AbA to obtain single colonies. For each clone, one colony is used to inoculate 5 ml SD-L medium and cells are grown at RT overnight. The next day, OD₆₀₀=0.3 is adjusted with sterile water, five additional 1/10 dilutions are prepared and 5 μl of each dilution step are spotted onto SD-L, SD-L 500 ng/ml AbA, 1000 ng/ml AbA, SD-L 1500 ng/ml AbA, SD-L 2000 ng/ml AbA, SD-L 2500 ng/ml AbA, SD-L 3000 ng/ml AbA, and SD-L 4000 ng/ml AbA plates. Clones are ranked according to their ability to grow on high AbA concentration. From best growing clones 5 ml of initial SD-L pre-culture are used to spin down cells and to resuspend them in 100 μl water or residual medium. After addition of 50 U lyticase (Sigma-Aldrich, L2524) cells are incubated for several hours at 37° C. and 300 rpm on a horizontal shaker. Generated spheroblasts are lysed by adding 10 μl 20% (w/v) SDS solution, mixed vigorously by vortexing for 1 min and frozen at −20° C. for at least 1 h. Afterwards, 250 μl Al buffer from NucleoSpin Plasmid kit and one spatula tip of glass beads (Sigma-Aldrich, G8772) are added and tubes are mixed vigorously by vortexing for 1 min. Plasmid isolation is further improved by adding 250 μl A2 buffer from NucleoSpin Plasmid kit and incubating for at least 15 min at RT before continuing with the standard NucleoSpin Plasmid kit protocol. After elution with 30 μl of elution buffer 5 μl of plasmid DNA are transformed into E. coli DH5 alpha by heat shock transformation. Two individual colonies are picked from ampicillin-containing LB plates, plasmids are isolated and library inserts are sequenced. Obtained results are analyzed for consensus sequences among the 6ZFPs for each target site.

### Cloning of Gene Promoters for Combined Secreted Luciferase and Alkaline Phosphatase Assay

[0188] DNA fragments containing promoter regions are cloned into pAN1485 (NEG-PG04, GeneCopeia) or pAN1486 (EF1a-PG04, GeneCopeia) resulting in reporter plasmids containing secreted Gaussia luciferase under the control of a haploinsufficient gene promoter and secreted embryonic alkaline phosphatase under the control of the constitutive CMV promoter allowing for normalization of luciferase to alkaline phosphatase signal.

### Cloning of a Reporter Plasmid for the Generation of Stable Luciferase/Secreted Alkaline Phosphatase Reporter Cell Lines for Testing Transducible Artificial Transcription Factor Activity

[0189] To generate a reporter construct containing Gaussia luciferase under the control of a hybrid CMV/artificial transcription factor target site promoter together with secreted alkaline phosphatase under control of the constitutive CMV promoter, 42 bp containing the artificial transcription factor binding site were cloned AflIII/SpeI into pAN1660 (SEQ ID NO: 277). These reporter constructs contain a FlpIn site for stable integration into FlpIn site containing cells such as HEK 293 FlpIn TRex (Invitrogen) cells.

### Cloning of Artificial Transcription Factors for Mammalian Transfection

[0190] DNA fragments encoding polydactyl zinc finger proteins either generated through Gensynthesis (GenScript) or selected by yeast one hybrid are cloned using standard procedures (AgeI/XhoI) into mammalian expression vectors for expression in mammalian cells as fusion proteins between the zinc finger array of interest, a SV40 NLS, a 3×myc epitope tag and a N-terminal KRAB domain (pAN1255—SEQ ID NO: 278), a C-terminal KRAB domain (pAN1258—SEQ ID NO: 279), a SID domain (pAN1257—SEQ ID NO: 280) or a VP64 activating domain (pAN1510—SEQ ID NO: 281).

[0191] Plasmids for the generation of stably transfected, tetracycline-inducible cells were generated as follows: DNA fragments encoding artificial transcriptions factors comprising polydactyl zinc finger domain, a regulatory domain (N-terminal KRAB, C-terminal KRAB, SID or VP64), SV40 NLS and a 3×myc epitope tag are cloned into pcDNA5/FRT/TO (Invitrogen) using EcoRV/NotI.

[0192] Plasmids for the generation of stably transfected, tetracycline-inducible cells were generated as follows: DNA fragments encoding artificial transcriptions factors comprising polydactyl zinc finger domain, a regulatory domain (N-terminal KRAB, C-terminal KRAB, SID or VP64), and a SV40 NLS are cloned into pAN2071 (SEQ ID NO: 282) EcoRV/AgeI. These artificial transcription factor expression plasmids can be integrated into the human genome into the AAVS1 locus by co-transfection with AAVS1 Left TALEN and AAVS1 Right TALEN (GeneCopoeia).

### Cell Culture and Transfections

[0193] HeLa cells are grown in Dulbecco's Modified Eagle's Medium (DMEM) supplemented with 4.5 g/l glucose, 10% heat-inactivated fetal bovine serum, 2 mM L-glutamine, and 1 mM sodium pyruvate (all from Sigma-Aldrich) in 5% CO₂ at 37° C. For luciferase reporter assay, 7000 HeLa cells/well are seeded into 96 well plates. Next day, co-transfections are performed using Effectene Transfection Reagent (Qiagen) according to the manufacturer's instructions. Plasmid midi preparations coding for artificial transcription factor and for luciferase are used in the ratio 3:1. Medium is replaced by 100 μl per well of fresh DMEM 6 h and 24 h after transfection.

### Generation and Maintenance of Flp-In™ T-Rex™ 293 Expression Cell Lines

[0194] Stable, tetracycline inducible Flp-In™ T-Rex™ 293 expression cell lines are generated by FlpIn Recombinase-mediated integration. Using Flp-In™ T-Rex™ Core Kit, the Flp-In™ T-Rex™ host cell line is generated by transfecting pFRT/lacZeo target site vector and pcDNA6/TR vector. For generation of inducible 293 expression cell lines, the pcDNA5/FRT/TO expression vector containing the gene of interest is integrated via Flp recombinase-mediated DNA recombination at the FRT site in the Flp-In™ T-Rex™ host cell line. Stable Flp-In™ T-Rex™ expression cell lines are maintained in selection medium containing (DMEM; 10% Tet-FBS; 2 mM glutamine; 15 μg/ml blasticidine and 100 μg/ml hygromycin). For induction of gene expression tetracycline is added to a final concentration of 1 μg/ml.

### Generation and Maintenance of Stably Artificial Transcription Factor Expressing Cell Lines Using TALENs

[0195] To generate cell lines stably expressing artificial transcription factors under the control of a tetracycline-inducible promoter, cells are co-transfected with a pAN2071-based expression construct containing the artificial transcription factor of interest and AAVS1 Left TALEN and AAVS1 Right TALEN (GeneCopoeia) plasmids using Effectene (Qiagen, transfection reagent) according to the manufacturer's recommendations. 8 hours post-transfection, growth medium was aspirated, cells were washed with PBS and fresh growth medium was added. 24 h post transfection cells were split at a ratio of 1:10 in growth medium containing Tet-approved FBS (tetracycline free FBS, Takara) without antibiotics. 48 h post-transfection, puromycin selection was started at cell-type specific concentration and cells were kept under selection pressure for 7-10 days. Colonies of stable cells were pooled and maintained in selection medium.

### Combined Luciferase/SEAP Promoter Activity Assay

[0196] HeLa cells are co-transfected with an artificial transcription factor expression construct and a plasmid carrying secreted Gaussia luciferase under the control of haploinsufficient promoter and secreted alkaline phosphatase under the control of the constitutive CMV promoter (Gaussia luciferase Glow Assay Kit, Pierce; SEAP Reporter Gene Assay chemiluminscent, Roche). Two days following transfection, cell culture supernatants were collected and luciferase activity and SEAP activity were measured using Secrete-Pair Dual Luminescence assay (GeneCopoeia) or SEAP reporter gene assay (Roche). Co-transfection of an expression plasmid for an inactive artificial transcription factor with all cysteine residues in the zinc finger domain exchanged to serine residues served as control. Luciferase activity was normalized to SEAP activity and expressed as percentage of control.

### Luciferase Reporter Assay for Assessing Artificial Transcription Factor Activity Following Protein Transduction

[0197] Stable HEK 293 FlpIn cells were prepared containing Gaussia luciferase under control of a hybrid CMV promoter containing the target site appropriate for the respective artificial transcription factor as well as SEAP under control of the constitutive CMV promoter. HEK 293 FlpIn cells were transfected with pAN1660, pAN2210 (SEQ ID NO: 283), pAN1705 (SEQ ID NO: 284), pAN2001 (SEQ ID NO: 285), pAN2122 (SEQ ID NO: 286), or pAN2100 (SEQ ID NO: 287), to generate cell lines for testing artificial transcription factors targeting ETRA (TS-74), ETRA (TS+50), FCER1A (TS-147), TLR4 (TS-222), TGFbR1 (TS-390), or AR (TS-236), respectively.

[0198] These cells were treated in OptiMem for 2 hours with the appropriate artificial transcription factor (1 μM) or with buffer, an unrelated or inactive artificial transcription factor as control. Following protein transduction, cells are harvested and reseeded into normal growth medium and luciferase as well as SEAP activity was measured after 24 hours according to manufacturer's recommendation (Gaussia Luciferase Glow Assay Kit, Thermo Scientific; SEAP Reporter Gene Assay Chemiluminescence, Roche). Luciferase values were normalized to SEAP activity and compared to control cells set to 100%.

### Determination of Gene Expression Levels by Quantitative RT-PCR

[0199] Total RNA is isolated from cells using the RNeasy Plus Mini Kit (Qiagen, Hilden, Germany) according to the manufacturer's instructions. Frozen cell pellets are resuspended in RLT Plus Lysis buffer containing 10 μl/ml β-mercaptoethanol. After homogenization using QIAshredder spin columns, total lysate is transferred to gDNA Eliminator spin columns to eliminate genomic DNA. One volume of 70% ethanol is added and total lysate is transferred to RNeasy spin columns. After several washing steps, RNA is eluted in a final volume of 30 μl RNase free water. RNA is stored at −80° C. until further use. Synthesis of cDNA is performed using the High Capacity cDNA Reverse Transcription Kit (Applied Biosystems, Branchburg, N.J., USA) according to the manufacturer's instructions. cDNA synthesis is carried out in 20 μl of total reaction volume containing 2 μl 10× Buffer, 0.8 μl 25×dNTP Mix, 2 μl 10×RT Random Primers, 1 μl Multiscribe Reverse Transcriptase and 4.2 μl H₂O. A final volume of 10 μl RNA is added and the reaction is performed under the following conditions: 10 minutes at 25° C., followed by 2 hours at 37° C. and a final step of 5 minutes at 85° C. Quantitative PCR is carried out in 20 μl of total reaction volume containing 1 μl 20×TaqMan Gene Expression Master Mix, 10.0 μl TaqMan® Universal PCR Master Mix (both Applied Biosystems, Branchburg, N.J., USA) and 8 μl H₂O. For each reaction 1 μl of cDNA is added. qPCR is performed using the ABI PRISM 7000 Sequence Detection System (Applied Biosystems, Branchburg, N.J., USA) under the following conditions: an initiation step for 2 minutes at 50° C. is followed by a first denaturation for 10 minutes at 95° C. and a further step consisting of 40 cycles of 15 seconds at 95° C. and 1 minute at 60° C.

### Cloning of Artificial Transcription Factors for Bacterial Expression

[0200] DNA fragments encoding artificial transcription factors are cloned using standard procedures with EcoRV/NotI into bacterial expression vector pAN983 (SEQ ID NO: 288) based on pET41a+ (Novagen) for expression in E. coli as His₆-tagged fusion proteins between the artificial transcription factor and the TAT protein transduction domain. For expression of cathepsin B sensitive artificial transcription factor containing a cathepsin B cleavage site of SEQ ID NO: 28, DNA fragments encoding artificial transcription factors are cloned using standard procedures (EcoRV/NotI) into bacterial expression vector pAN1688 (SEQ ID NO: 289).

[0201] Expression constructs for the bacterial production of cathepsin B-sensitive transducible artificial transcription factors in suitable E. coli host cells such as BL21(DE3) targeting ETRA, FcER1A, TLR4, AR, OPA1, or TGFbR1 are pAN1688, pAN1880 (SEQ ID NO: 290), pAN1966 (SEQ ID NO: 291), pAN2054 (SEQ ID NO: 292), pAN2056 (SEQ ID NO: 293), pAN2058 (SEQ ID NO: 294), pAN2060 (SEQ ID NO: 295), pAN2062 (SEQ ID NO: 296), pAN2064 (SEQ ID NO: 297), pAN2104 (SEQ ID NO: 298), pAN2112 (SEQ ID NO: 299), pAN2114 (SEQ ID NO: 300), pAN2116 (SEQ ID NO: 301), pAN2132 (SEQ ID NO: 302), pAN2134 (SEQ ID NO: 303), pAN2159 (SEQ ID NO: 304), pAN2160 (SEQ ID NO: 305), pAN2161 (SEQ ID NO: 306), pAN2286 (SEQ ID NO: 307), pAN2287 (SEQ ID NO: 308), pAN2288 (SEQ ID NO: 309), pAN2289 (SEQ ID NO: 310), pAN2290 (SEQ ID NO: 311), pAN2291 (SEQ ID NO: 312), pAN2292 (SEQ ID NO: 313), pAN2293 (SEQ ID NO: 314), pAN2323 (SEQ ID NO: 315), pAN2326 (SEQ ID NO: 316), pAN2328 (SEQ ID NO: 317), pAN2331 (SEQ ID NO: 318), and pAN2334 (SEQ ID NO: 319).

### Production of Artificial Transcription Factor Protein

[0202] E. coli BL21(DE3) transformed with expression plasmid for a given artificial transcription factor were grown in 1 I LB media supplemented with 100 μM ZnCl₂ until OD₆₀₀ between 0.8 and 1 was reached, and induced with 1 mM IPTG for two hours. Bacteria were harvested by centrifugation, bacterial lysate was prepared by sonication, and inclusion bodies were purified. To this end, inclusion bodies were collected by centrifugation (5000 g, 4° C., 15 minutes) and washed three times in 20 ml of binding buffer (50 mM HEPES, 500 mM NaCl, 10 mM imidazole; pH 7.5). Purified inclusion bodies were solubilized on ice for one hour in 30 ml of binding buffer A (50 mM HEPES, 500 mM NaCl, 10 mM imidazole, 6 M GuHCl; pH 7.5). Solubilized inclusion bodies were centrifuged for 40 minutes at 4° C. and 13'000 g and filtered through 0.45 μm PVDF filter. His-tagged artificial transcription factors were purified using His-Trap columns on an Äktaprime FPLC (GEHealthcare) using binding buffer A and elution buffer B (50 mM HEPES, 500 mM NaCl, 500 mM imidazole, 6 M GuHCl; pH 7.5). Fractions containing purified artificial transcription factor were pooled and dialyzed at 4° C. overnight against buffer S (50 mM Tris-HCl, 500 mM NaCl, 200 mM arginine, 100 μM ZnCl₂, 5 mM GSH, 0.5 mM GSSG, 50% glycerol; pH 7.5) in case the artificial transcription factor contained a SID domain, or against buffer K (50 mM Tris-HCl, 300 mM NaCl, 500 mM arginine, 100 μM ZnCl₂, 5 mM GSH, 0.5 mM GSSG, 50% glycerol; pH 8.5) for KRAB domain containing artificial transcription factors. Following dialysis, protein samples were centrifuged at 14'000 rpm for 30 minutes at 4° C. and sterile filtered using 0.22 μm Millex-GV filter tips (Millipore). For artificial transcription factors containing VP64 activation domain, the protein was produced from the soluble fraction (binding buffer: 50 mM NaPO₄ pH 7.5, 500 mM NaCl, 10 mM imidazole; elution buffer 50 mM HEPES pH 7.5, 500 mM NaCl, 500 mM imidazole) using His-Bond Ni-NTA resin (Novagen) according to manufactures recommendation. Protein was dialyzed against VP64-buffer (550 mM NaCl pH 7.4, 400 mM arginine, 100 μM ZnCl₂).

### Determination of DNA Binding Activity of Artificial Transcription Factors Using ELDIA (Enzyme-Linked DNA Interaction Assay)

[0203] BSA pre-blocked nickel coated plates (Pierce) are washed 3 times with wash buffer (25 mM Tris/HCl pH 7.5, 150 mM NaCl, 0.1% BSA, 0.05% Tween-20). Plates are coated with purified artificial transcription factor under saturating conditions (50 pmol/well) in storage buffer and incubated 1 h at RT with slight shake. After 3 washing steps, 1×10⁻¹² to 5×10⁻⁷ M of annealed, biotinylated oligos containing 60 bp promoter sequence are incubated in binding buffer (10 mM Tris/HCl pH 7.5, 60 mM KCl, 1 mM DTT, 2% glycerol, 5 mM MgCl₂ and 100 μM ZnCl₂) in the presence of unspecific competitor (0.1 mg/ml ssDNA from salmon sperm, Sigma) with the bound artificial transcription factor for 1 h at RT. After washing (5 times), wells are blocked with 3% BSA for 30 minutes at RT. Anti-streptavidin-HRP is added in binding buffer for 1 h at RT. After 5 washing steps, TMB substrate (Sigma) is added and incubated for 2 to 30 minutes at RT. Reaction is stopped by addition of TMB stop solution (Sigma) and sample extinction is read at 450 nm. Data analysis of ligand binding kinetics is done using Sigma Plot V8.1 according to Hill.

### Protein Transduction

[0204] Cells grown to about 80% confluency are treated with 0.01 to 1 μM artificial transcription factor or mock treated for 2 h to 120 h with optional addition of artificial transcription factor every 24 h in OptiMEM or growth media at 37° C. Optionally, 10-500 μM ZnCl₂ are added to the growth media. For immunofluorescence, cells are washed once in PBS, trypsinized and seeded onto glass cover slips for further examination.

### Immunofluorescence

[0205] Cells are fixed with 4% paraformaldehyde in PBS, treated with 0.15% Triton X-100 for 15 minutes, blocked with 10% BSA/PBS and incubated overnight with mouse anti-HA antibody (1:500, H9658, Sigma) or mouse anti-myc (1:500, M5546, Sigma). Samples are washed three times with PBS/1% BSA, and incubated with goat anti-mouse antibodies coupled to Alexa Fluor 546 (1:1000, Invitrogen) and counterstained using DAPI (1:1000 of 1 mg/ml for 3 minutes, Sigma). Samples are analyzed using fluorescence microscopy.

### Western Blotting

[0206] For measuring protein levels, cells are lysed using RIPA buffer (Pierce) and protein lysates are mixed with Laemmli sample buffer. Proteins are separated by SDS-PAGE according to their size and transferred using electroblotting to nitrocellulose membranes. Detection of proteins is performed using specific primary antibodies raised in mice or rabbits. Detection of primary antibodies is performed either by secondary antibodies coupled to horseradish peroxidase and luminescence-based detection (ECL plus, Pierce) or secondary antibodies coupled to DyLight700 or DyLight800 fluorescent detected and quantified using an infrared laser scanner.

### Measuring Mitochondrial Function

[0207] For flow cytometric analysis, treated cells are harvested with 10 mM EDTA/PBS. Mock treated cells are used as control. For measuring mitochondrial membrane potential, cells are resuspended in FACS buffer P (PBS, 5 mM EDTA, 0.5% (w/v) BSA, 1 μg/ml 4′,6-diamidino-2-phenylindole dihydrochloride (DAPI, Sigma), 10 nM tetramethylrhodamine ethylester (TMRE, Sigma) and incubated for 30 min at 37° C. prior to analysis. Treatment with 50 μM carbonyl cyanide 3-chlorophenylhydrazone (CCCP, Sigma) to dissipate mitochondrial membrane potential serves as control. For measurement of mitochondrial mass, cells are resuspended in FACS buffer M (PBS, 5 mM EDTA, 0.5% (w/v) BSA, 1 μg/ml DAPI and 100 nM MitoTracker green FM (Invitrogen) and incubated for 30 min at 37° C. prior to analysis. For mitochondrial ROS measurements, cells are resuspended in FACS buffer R (PBS, 5 mM EDTA, 0.5% BSA, 1 μg/ml DAPI and 5 μM MitoSOX (Invitrogen), incubated for 10 min at 37° C., washed with PBS, and resuspended in FACS buffer R2 (PBS, 5 mM EDTA, 0.5% (w/v) BSA). Flow cytometric analysis is performed on a CyAn_{ADP} (Dako) using FlowJo software (Tree Star Inc.).

### Measuring Cellular Apoptosis

[0208] Cells are fixed for 30 minutes at RT with 4% EM-grade paraformaldehyde (Pierce, 28908) in phosphate-buffered saline (PBS). Then, cells are permeabilized with 0.15% (v/v) Triton X-100 in PBS for 15 min at RT, followed by blocking with 10% (w/v) BSA in PBS for 1 hour at RT. Samples are incubated overnight at 4° C. with mouse anti-cytochrome c antibodies (BD Biosciences, 556432, 1:1000) diluted in blocking buffer. Cells are washed three times for 15 minutes with blocking buffer and then incubated for 1 hour at RT with Alexa Fluor 546-conjugated goat anti-mouse IgG antibodies (Invitrogen). Cytochrome c release as measure of apoptosis is analyzed by fluorescence microscopy by a blinded observer. Mock treated cells serve as control.

### Calcium Flux Measurements

[0209] Cells are seeded into 96-well Corning® CellBIND® plates and allowed to adhere in a humidified incubator (37° C.; 5% CO₂). The following day the cells are loaded using the Calcium 5 Assay Kit (Molecular Devices, CA, United States) as follows: For suspension cells the loading buffer is prepared as a two times solution in HBSS/20 mM HEPES (pH 7.4) and 100 μl/well are added to the wells containing 100 μl culture media. For adherent cells the loading buffer is prepared as a onetime solution in HBSS/20 mM HEPES (pH 7.4) and 100 μl/well are added to the wells directly after aspiration of culture media. When indicated, probenecid is added to the loading buffer to achieve a final in-well concentration of 2.5 mM. For dilution of ligands HBSS/20 mM HEPES (pH 7.4) is used. Calcium assays are carried out on a FlexStation® Instrument (Molecular Devices, CA, United States) according to the manufacturer's instructions. Data analysis is performed using SoftMax®Pro software.

Human Uterine Smooth Muscle Cells (hUtSMC) Lattice Contraction Assay 250 μl of sterile bovine collagen (3.1 mg/ml; #5005-B Nutacon) were mixed with 30 μl 10×PBS and 22.5 μl 0.1 N NaOH to reach a pH 7.4. 25000 hUtSMCs in 200 μl of SMC media 2 were added to the neutralized collagen, gently mixed, transferred to 24 well tissue culture plate and allowed to polymerize at 37° C., 5% CO₂ for 45 minutes. After polymerization, 500 μl of SMC growth media 2 were added. For treatment with artificial transcription factor, 1 μM ETRA+74VrepSNPS or an appropriate amount of buffer as control were added right after polymerization and again after 24 and 48 hours. 72 hours after polymerization, lattices were detached from the vessel wall by gently shaking or the help of a spatula and 100 nM of ET-1 or buffer control were added. Lattices were scanned and lattice area was determined by image analysis using ImageJ software.

### Human Coronary Contraction Assay

[0210] Human coronary arteries were dissected and cut into ring segments of approximately 2 mm length and placed individually into wells of a 96 well culture plate. Vessels were incubated in 250 μl of RPMI medium supplemented with penicillin (1000 IU/ml); streptomycin (100 μg/ml), amphotericin (0.25 μg/ml) and 1 μM ETRA+74VrepS or vehicle controls. Vessels were cultured for three days in an incubator at 37° C. in a humidified atmosphere of 5% CO₂ in air. Media was exchanged every 24 hours. One hour prior to media exchange, 3 nM endothelin were added to the vessels. Following incubation vessels were mounted in myograph baths (DMT) containing PSS (119.0 mM NaCl, 4.7 mM KCl, 1.2 mM MgSO₄, 24.9 mM NaHCO₃, 1.2 mM KH₂PO₄, 2.5 mM CaCl₂ and 11.1 mM glucose), aerated with 95% O₂ and 5% CO₂ and maintained at a temperature of 37° C. Tissues were exposed to potassium PSS (KPSS; 62.5 mM) three times, rinsed with PSS and allowed to return to baseline. Tissues were then exposed to U46619 (100 nM), followed by incubation with bradykinin (10 μM). Tissues were then rinsed, allowed to return to baseline and then exposed to the endothelin-1 in a cumulative concentration response curve (0, 1, 3, 10, 30, 100, 300 nM endothelin-1).

### Measuring Anaphylaxis in Humanized NSG Mice

[0211] Humanized NSG mice (2 animals/group—Jackson Laboratories) with an engraftment level of human CD45+ cells of at least 25% were treated with IgeR-147ArepS (30 mg/kg i.v.) or vehicle control 96 and 48 hours before induction of anaphylaxis. Mice were sensitized using anti-DNP IgE (3 μg i.v.) and treated with DNP-BSA (500 μg i.v.) or BSA (500 μg i.v.) as control to trigger anaphylaxis. Immediately after application of the anaphylactic trigger, body temperature was assessed by measuring rectal temperature every 5 minutes for 30 minutes and every 15 minutes for the next 90 minutes and every 30 minutes for the next two hours. In case of a drop in body temperature below 30° C., animals were euthanized.

1. An artificial transcription factor comprising a polydactyl zinc finger protein targeting specifically a gene promoter fused to an activatory or inhibitory protein domain, a nuclear localization sequence, a protein transduction domain, and an endosome-specific protease recognition site.

2. The artificial transcription factor according to claim 1, wherein the gene promoter is the promoter of a receptor gene.

3. The artificial transcription factor according to claim 1, wherein the gene promoter is the promoter of a nuclear receptor gene.

4. The artificial transcription factor according to claim 1, wherein the gene promoter is the promoter of a haploinsufficient gene.

5. The artificial transcription factor according to claim 1, wherein the endosome-specific protease recognition site is a cathepsin cleavage site.

6. The artificial transcription factor according to claim 5, wherein the endosome-specific protease recognition site is a cathepsin B cleavage site.

7. The artificial transcription factor according to claim 6, wherein the endosome-specific protease recognition site is a cathepsin B cleavage site of SEQ ID NO: 28.

8. The artificial transcription factor according to claim 1 comprising a zinc finger protein of a protein sequence selected from the group consisting of SEQ ID NO: 64 to 89, 144 to 147, 156 to 161, 174 to 177, 188, 191 to 193, 200 to 205, 218 to 220, and 227 to 244.

9. The artificial transcription factor according to claim 1 comprising a zinc finger protein of a protein sequence selected from the group consisting of SEQ ID NO: 64 to 89, 144 to 147, 156 to 161, 174 to 177, 188, 191 to 193, 200 to 205, 218 to 220, and 227 to 244, wherein up to three individual zinc finger modules are exchanged against other zinc finger modules with alternative binding characteristic and/or wherein up to twelve individual amino acids are exchanged.

10. The artificial transcription factor according to claim 1, wherein the activatory or inhibitory protein domain is selected from the group consisting of VP16, VP64, CJ7, p65-TA1, SAD, NF-1, AP-2, SP1-A, SP1-B, Oct-1, Oct-2, Oct2-5x, MTF-1, BTEB-2, LKLF, N-KRAB, C-KRAB, SID and ERD.

11. The artificial transcription factor according to claim 1, wherein the nuclear localization sequence is a cluster of basic amino acids containing a lysine residue followed by a lysine or arginine residue, followed by any amino acid, followed by a lysine or arginine residue, or the SV40 NLS of SEQ ID NO: 37.

12. The artificial transcription factor according to claim 1, wherein the protein transduction domain is selected from the group consisting of the HIV derived TAT peptide of SEQ ID NO: 20, mT02 of SEQ ID NO: 21, mT03 of SEQ ID NO: 22, R9 of SEQ ID NO: 23, and ANTP of SEQ ID NO: 24.

13. The artificial transcription factor according to claim 1 linked to a fusogenic peptide of SEQ ID NO: 25 to 27 through an endosomal protease-sensitive linker.

14. The artificial transcription factor according to claim 1 further comprising a polyethylene glycol residue.

15. The artificial transcription factor according to claim 1 for use in increasing or decreasing the expression from a gene promoter.

16. A pharmaceutical composition comprising an artificial transcription factor according to claim 1.

17. An E. coli host cell containing an expression construct of SEQ ID NO: 289 to 319 for use in the production of an artificial transcription factor of claim 1.

18. The artificial transcription factor according to claim 1 for use in treating a disease wherein modulation of gene expression is therapeutically beneficial.

19. A method of treating a disease wherein modulation of gene expression is therapeutically beneficial, comprising administering a therapeutically effective amount of an artificial transcription factor according to claim 1 to a patient in need thereof.

The application's sequence listing, which the Patent Office published only in electronic form, follows.

SEQUENCE LISTING (319 sequences)

SEQ ID NO: 1 - protein, 98 aa, Homo sapiens
MDAKSLTAWSRTLVTFKDVFVDFTREEWKLLDTAQQIVYRNVMLENYKNLVSLGYQLTKPDVILRLEKGEEPWLVEREIHQETHPDSETAFEIKSSVS

SEQ ID NO: 2 - protein, 45 aa, Homo sapiens
RTLVTFKDVFVDFTREEWKLLDTAQQIVYRNVMLENYKNLVSLGY

SEQ ID NO: 3 - protein, 36 aa, Homo sapiens
MAAAVRMNIQMLLEAADYLERREREAEHGYASMLPY

SEQ ID NO: 4 - protein, 58 aa, Homo sapiens
GASQCMPLKLRFKRRWSEDCRLEGGGGPAGGFEDEGEDKKVRGEGPGEAGGPLTPRRV

SEQ ID NO: 5 - protein, 13 aa, herpes simplex virus 7
DALDDFDLDMLGS

SEQ ID NO: 6 - protein, 55 aa, herpes simplex virus 7
GRADALDDFDLDMLGSDALDDFDLDMLGSDALDDFDLDMLGSDALDDFDLDMLIN

SEQ ID NO: 7 - protein, 102 aa, Homo sapiens
KGFGAFERSILTQIDHILMDKERLLRRTQTKRSVYRVLGKPEPAAQPVPESLPGEPEILPQAPANAHLKDLDEEIFDDDDFYHQLLRELIERKTSSLDPNDQ

SEQ ID NO: 8 - protein, 31 aa, Homo sapiens
PGLPNGLLSGDEDFSSIADMDFSALLSQISS

SEQ ID NO: 9 - protein, 48 aa, Homo sapiens
PYTPNLPHHQNGHLQHHPPMPPHPGHYWPVHNELAFQPPISNHPAPEY

SEQ ID NO: 10 - protein, 100 aa, Homo sapiens
PPHLNPQDPLKDLVSLACDPASQQPGPLNGSGQLKMPSHCLSAQMLAPPPPGLPRLALPPATKPATTSEGGATSPTSPSYSPPDTSPANRSFVGLGPRDP

SEQ ID NO: 11 - protein, 68 aa, Homo sapiens
ADFQPPYFPPPYQPIYPQSQDPYSHVNDPYSLNPLHAQPQPQHPGWPGQRQSQESGLLHTHRGLPHQL

SEQ ID NO: 12 - protein, 112 aa, Homo sapiens
NRTVSGGQYVVAAAPNLQNQQVLTGLPGVMPNIQYQVIPQFQTVDGQQLQFAATGAQVQQDGSGQIQIIPGANQQIITNRGSGGNIIAAMPNLLQQAVPLQGLANNVLSGQT

SEQ ID NO: 13 - protein, 143 aa, Homo sapiens
QGQTPQRVSGLQGSDALNIQQNQTSGGSLQAGQQKEGEQNQQTQQQQILIQPQLVQGGQALQALQAAPLSGQTFTTQAISQETLQNLQLQAVPNSGPIIIRTPTVGPNGQVSWQTLQLQNLQVQNPQAQTITLAPMQGVSLGQ

SEQ ID NO: 14 - protein, 95 aa, Homo sapiens
DLQQLQQLQQQNLNLQQFVLVHPTTNLQPAQFIISQTPQGQQGLLQAQNLLTQLPQQSQANLLQSQPSITLTSQPATPTRTIAATPIQTLPQSQS

SEQ ID NO: 15 - protein, 63 aa, Homo sapiens
QLAGDIQQLLQLQQLVLVPGHHLQPPAQFLLPQAQQSQPGLLPTPNLFQLPQQTQGALLTSQP

SEQ ID NO: 16 - protein, 90 aa, Artificial Sequence
  synthetic construct
NLFQLPQQTQGALLTSQPNLFQLPQQTQGALLTSQPNLFQLPQQTQGALLTSQPNLFQLPQQTQGALLTSQPNLFQLPQQTQGALLTSQP

SEQ ID NO: 17 - protein, 91 aa, Homo sapiens
PPSTGNSASLSLPLVLQPGLSEPPQPLLPASAPSAPPPAPSLGPGSQQAAFGNPPALLQPPEVPVPHSTQFAANHQEFLPHPQAPQPIVPG

SEQ ID NO: 18 - protein, 111 aa, Homo sapiens
MATRVLSMSARLGPVPQPPAPQDEPVFAQLKPVLGAANPARDAALFPGEELKHAHHRPQAQPAPAQAPQPAQPPATGPRLPPEDLVQTRCEMEKYLTPQLPPVPIIPEHKK

SEQ ID NO: 19 - protein, 88 aa, Homo sapiens
MALSEPILPSFSTFASPCRERGLQERWPRAEPESGGTDDDLNSVLDFILSMGLDGLGAEAAPEPPPPPPPPAFYYPEPGAPPPYSAPA

SEQ ID NO: 20 - protein, 11 aa, Human immunodeficiency virus
YGRKKRRQRRR

SEQ ID NO: 21 - protein, 12 aa, Artificial Sequence
  Synthetic construct
PVRRPRRRRRRK

SEQ ID NO: 22 - protein, 12 aa, Artificial Sequence
  Synthetic construct
THRLPRRRRRRK

SEQ ID NO: 23 - protein, 9 aa, Artificial Sequence
  Synthetic construct
RRRRRRRRR

SEQ ID NO: 24 - protein, 16 aa, Drosophila melanogaster
RQILIWFQNRRMKWKK

SEQ ID NO: 25 - protein, 20 aa, Influenza A virus
GDIMGEWGNEIFGAIAGFLG

SEQ ID NO: 26 - protein, 30 aa, Artificial Sequence
  synthetic construct
WEAKLAKALAKALAKHLAKALAKALKACEA

SEQ ID NO: 27 - protein, 30 aa, Artificial Sequence
  synthetic construct
WEAALAEALAEALAEHLAEALAEALEALAA

SEQ ID NO: 28 - protein, 10 aa, Homo sapiens
QPMKRLTLGN

SEQ ID NO: 29 - DNA, 6950 bp, Homo sapiens
gtgtctatgaatttaactattctaggtacctcatctaagtgggataataaaatatctatctttccttttatgtctggcttatttcacttaacataatatcttaaacgttcatccatgtggtagcatatatcattcttttttaaagctgaataatgttctgtgttatgtacatgtatttatatacatatacatacatgtatataccacattttgtttatccattcttccactgatggatatttggattgtttccatcttttggctagttttcaccttttggcttttctgaataatgctgctatgaatatgggtgtacaaatatctgtttgagactctgctttcaattatttaggtaagtaccaaaaagtagaattgctggatcatagggtaattttatgtttaatttttggagggctgccatgctgttttccacaactgctacactatattttacattcagactggcaatgcacaagggttccaatttctcaacattcttgccaacacttgttctttgctgtttttgcttttgttttactataatggctatcctaataggtgtgaaggaagaatttttagtaactagtcctacaccacagtgagatcagctgtctcaataggtgggtcatgatgaatgtgttctagcaaagactggacagattgacatattcagatatgcaggtgatgcactgtccaagtgtgtctggccacagagtgaataagggctgaaatccagcacatgtttcacgggccaagatgtgaactgcctcttttgggaggaagcagtaagtttttctttcccgaaaatattgtcagcttgccaagccacatgcccaaagggtcacctttttttaatataaacaatggcacttataaaagctattagttattctggttggctgattctccctcctagagaagctgtaagattagtgaacagggtaatatctagtctaaccctactagatgactattaaggcctctttcaatggtggttttctgtagatctctttgatggttttacaaaatggtccctaaattctttgacactcctcacactaagggttgggctctatataccctcaccttcaatctgggatttgtgactgcttgactaatagaatcaagcagaaatgacacggtgccagtttctgggcccagcccttaagaaactggcagcttccactttctgtctctggggacattcactcttggatccccgccaccatgctgtgaggaagcccaaaccacaagtctccacaagtctttgtggagagacgcacgtggagaaaaactaacactcaacaccaagcaagtgaactgtcttggaagtggatcctccagcccctgctacatggagcaaaaacgagctgtcccagacaggctctgcccaaactgcagactgataagcagagtaaatgagtgttgttattttaagccactacgttttatagtaatttgtttagctgcagcagatagccggaacagcatgggatataacatgaccagtgctccaacctcacacttctaccatgtgctgactctagcagtgcactgaaggactccaaggcaggccttccctgaggagaccccagtttttactcacatgtcacaggcagtggcctttgtccctcatctcctctcccacccccaatttaggataaagtatctgccgtgataaagacgttgagacccactttctgtaaggtcggcttcttcattgtttgaatttcttgaggtttcacggagccacgcgctggaaccttccatagtctctcctgaggctccttctttgccctgggctggaggtctgtagccgtgggatgctggctacaagggacaagatagaagcaaaccacctgatccagtaaactgctgtccacttcggctcctcaacggcctctaagcttaagagggagcacgcaagccaagcaaaggcggcagggaagacggagaagaaaccacccgtgggccctggctctgtgtccagttgttccgtcacagatcaaatctgcctgcactaagaggatgggttcctctgcaaggcctttcggaattctgagtcttgtctgtcaaactctaccctctctcctccacatcccccaccttttctttcaggaaggaaatagttaaaaaagactcctgcccttcagggcctggaagggggcggcagctttgtgctttttagtggccgcgtcccaggatagctggaaggttaggacgctcttgcggtcccagagtggagtggaaggtctggagctttgggaggagacggggaggacagactggaggcgtgttcctccggagttttctttttcgtgcgagccctcgcgcgcgcgtacagtcatcccgctggtctgacgattgtggagaggcggtggagaggcttcatccatcccacccggtcgtcgccggggattggggtcccagcgagacctccccgggagaagcagtgcccaggaggttttctgaagccggggaagctgtgcagccgaagccgccgccgcgccggagcccgggacaccggccaccctccgcgccacccaccctcgccggctccggcttcctctggcccaggcgccgcgcggacccggcagctgtctgcgcacgccgagctccacggtcggtgcaagtctttcttatcggggactgggactggggcgggtgcggggatggcggagacgctgcctgggcccctcggtcgggagaagacgagagctgggaacgttctggcccgaccgccctgcagcttgggcgacccgtcgcagcaggggctggcacccacttgccccagggcgcgcggggaggcgggcgccttccgtgaggggtgcgctgcggacacgtgtagagttcggggaacttcacctctccacgttagggtttaggattcggagttttaggaagaggaagcccaatagttttccctgggtgaccccttttccccaggcatgcaagaactttgaggaacgccaagctctgtggcttgctccagcgccttcttgtgaagttggctccacagccttttcttactggcttgcttttcctcccccacatctgggtctgggtatgccaagggtagccaagggcactcggtgtgagggactgaggtgtttggggaaaccccctgtgtagctagttttggaaacctgcctgtggaggtctgggcgttttgttctgtgctcgcctttaaaggacacttgttgcttctcacgtgcagaaaacaagggctgcttctagataatcaccctctgtttacatcatcctaatggctttcccctgatagagttgggggtgggaggcatattaaactcaggcgttgtctctaaggagagttgctcatttcttaaccagagagcaaaacctcagaaaacttgtaaaaagttcctacttttacttgttttttcctccacctgtagttgtctatgtgttagctaattgagaaacaccttggcagtcatttcatgtaaattgaatgctctaaactcatgccattttgataaggtctgaatttccaaattaccaattacaggtgaactttgatcctgagagtctcatatgttaaatggttaaagtgtaagcgtaaggattcagtcctctttcttaataatagtttttgcactccccaaactctcagattccaaacaggaagaatgctgaatctatagaccatgtccttcaggtctgaacctgagatgcttcactagcgctatgactgattatgagtgatgattcaaagcacagcctgactcagattcctggaaatgagctacagacccaccttggaagaacctgcagttgaggggcttctttcatttggttttgtacttttcagccaatgataatatgacatccacaggcctttgccaagtatcccttagttttgcagcttaacatgtgtggagagctgatagagaagtcatcagaaatgatttctgtagtggtgtcattgttggaggaggaaggaagggggttttaatgatagctggctctcatgccttaagaacccacagcgttggccttacctcctggcataatcagctaaccaagcagaccagcatgctaacgttcaaagcaccacaggacctctgatgagtagagcagtacccaccgtagccaggtcagttcacaggtcagttcccagccgactgtaaccggcagagagccattccatttctgcaaaggccttctctctctcatttttaagaaagctgttattgaaggttccctttcatttgggaagctggaagacgttagtcacgaaacagcacaagatatgaaagtatttcttctcccccctgtatctgtgatccaaaaaggaggatgacaagaagcttttctcttggagtcctggtgttccctttggaatggaaatggtgtcatttcataggtctatcaatttttggccagatactcactccagattataagaagcaggaaaaaactgcaaactgtttataattaagtctagtcagagctgacaaatacatggcctgcctctagccttgaaaaattgatatttttcccatttaatcagagtgagtcaagtcctataagcaaaattatgtgtcctgccatttcttggctttgaaaccttgacctaaatacttcttcaagactctggtttccttataagtaaaatggagatattgctcctgcctacctagagtcgtaaagctcaaggcagataacagatacatatataataagttactatatgtaaatactattattatttcagagttcagggggaaatctctggggaaggcaaaagtatccaatactcgcactttatatataccctatactttctatgcaacttgaataaatcttattttatccacgtattggccaaacctaagctttactgatttcccaagataattgtcaaaattcctaaaagtggttaacatcaaccttgaatacactcagaaaaaggattcaattttattttttactttttatttatttaatttttttttttttgagacagggtctcactctgctgctcaggatggagtgcagtgactcgatcatagctccctgcagccttaacctcctggactcaagtgattctcccatctcagcctcccaagtagctgagactacaggcacacgccaccatgcctgtctaatcttttttatgttttgtaaagacagggtctcactaagttgcccaggctagtttcaaactcctgggctcaagtgatcctcctgctttggcctcccaaagtgctgagattatagacatgagccaccacacccaaccaggactcaatttttttaagattaaattatgacctgggtatatacatcacagacacgtacacacaccaccgcataaatcagattatgtcttcatttgaagattcataaaagcctacagaaaaggaaatatataaaatattgaaataggatgagctatttttaattatctttgattattccttattaaggtctcctagacttcctggacaggaaggaccacttgctctctgcaagtgacttaaaaataaataaataaataaataaaccacaccagatggtctttgaaaatgtctaaccaccctcctgagtctattgcttcatctaaactctggagacttctttaaaatattttacatacaaataaagcacaagaatgagagacaggatggtttagtggttaacagctccggctcagagttggactgacctgccttagaatcgcagtgttgccacccatcacctgtggccttgacaagctgcttcaccctcctgggcctctgtttccctatcttcaaaattgaaccgtggatctaccccacaggaccattgtatggattacagggcatcatgcacatatagtactgagtacagtgactggcataaaataaatgtagctatataggatggttaaaagatagcatggggacaggtgtcccttggaaaccaaaatactatgactagcctggaaaagttcattactcccatttcattcatcggcaaataccgtattgtgatgataatttctgagaaatgaaaaagcaaaaaaactcctgtaaaaaatttagattttacacattaatcatcaaggttttcaaaacaaatgtttttatcaattatttcattcttaattgaaactaaaattgttagatgtgttaatggtgttaaccagagttctcattaacatttcataacactttagatggctacctgtgctgcacttcatccctatgttcattatttatcatatgcaagacagcacacattttagaagattcaatttttacattcgataattttattttatgcctcaataccctgtaccctttactcagcatataatgccttttctctttcattaaaaaatatgtttgtatctcaactcttgaagatttttgtaattcaggttcttatcagcctgaatgtagagaaagaagtaactactacttaaaggaaaaactgacatagcctcatccatattatgatgtagatataagtatagctatgtatagagatgagtgagagagacaaagctagagagatagggagatggagatagagctagagatggaaatagagacagagatagatagctatagagacggaaatggagacagagacagagacggagatgacagagatgatggagatgatggagatggagatggagactgacatagaggagatagagcttgccctaatagagcttcagtttttttctggttttgctctgtcatagggtaacctgatatacatatatcttatctaatcaccaaatatatcctgcattttaattgaatcaataaataatcattgactatgatctttttggcaactgggttttggaacaaaaattatttttccttttgtttcaggtgaaaaaaaagtgaaggtgtaaaagcagcacaagtgcaataagagatatttcctcaaatttgcctcaagatggaaaccctttgcctcagggc

SEQ ID NO: 30 - DNA, 1180 bp, Homo sapiens
tgtccccggacgaggactgcccccctccctcgggcaactactactgatgctgtccaggcatcgcccaaggggaaaggttgcagcggggtcggaaggcgcgggaggagtctggcggtgattgatgggaagggatgaatgaataaaagtacttgtctgatggcagcagagaccccgagcaaacggtggaggctacactgtctggcattctcgcagcgtttcgtcagagccggacccgcctgcagctcaagggaggcgtgctcctctcccagagcaggctggaacccagctgggttccgcctcccgggaaggtggtctccattcgtcgctctgcatctggtttgtcagatccgagaggtaaacattcgggcttggtgttgaattaaaatcattgattgaaccttattctggggcttcggtttggcttactagtttgggattttaaaaaaataaaaattaagcctatagagagggcaaattaaaattaggttgggtaaaggaaggagcgcgagtgtttgaagccgtttggagggaacagcggtttccaagttcctgctgacttgagaagtctctgcgggtttccgaatctccggcgcactcctgggcgcgctgcgggagctgtagctcagccagccagggagtagcggctttcatccgccgggaggagtctttcgagttcaatcgcggggtatagaggttcccctgcggggcaaaatgcagagcttgacacaagcccttggcctctaggtgccttaattccgcggttcccacgcacgcttaactaagacgtgtctgtattcctcccgttacgtgaaagagttcggagctttgcctgggacccccatcattccctccctggcacaccccttccagaacgccccgccccactgcatattatttacccctcctggccacgcgggggaagaaaaacagctgagagggcatcaggaaggagtttcgacccgcgctggcgagtcatgagcgccaagtttcccactggcgcgcaaacttgagttacttttgagcgtggatactggcgaagaggctgcgggcggtattagcgtttgcagcgacttggctcgggcagctgacccaagtgtcctgtcttccttcctctgcttgtctctaggctctgaaactgcggagcggccaccggacgccttctggagcaggtagcagcatg

SEQ ID NO: 31 - DNA, 644 bp, Homo sapiens
ccttgagttcagactggaagcctctagaattgtgagaaaatgaatgtctgttgtttaagccacccagtctgtggtatttccttatggcagccccagcaaactaatacaaatagtgtttccacagctgaaacaaaattggaaaatcaccgtcatcctagagagttacaagggctattttaatagaacctgattgttttcctaaattcaccaagcccaggcagaggtcagatgactaattgggataaaagccaactagcttcctcttgctgtttctttagccactggtctgcaggcgttttcttcttctaacttcctctcctgtgacaaaagagataactattagagaaacaaaagtccagaatgctaaggttgccgctttcacttcctctcaccctttagcccagaactgctttgaatacaccaattgctgtggggcggctcgaggaagagaagacaccagtgcctcagaaactgctcggtcagacggtgatagcgagccacgcattcacagggccactgctgctcacagaagcagtgaggatgatgccaggatgatgtctgcctcgcgcctggctgggactctgatcccagccatggccttcctctcctgcgtgagaccagaaagctgggagccctgcgtggag

SEQ ID NO: 32 - DNA, 220 bp, Homo sapiens
taagtgggtaaatattaaattgcccagttgggcaccatcctgaatattatctctaaagaaagaagcaaaaccaggcacagctgatgggttaaccagatatgatacagaaaacatttccttctgctttttggttttaagcctatatttgaagccttagatctctccagcacagtaagcaccaggagtccatgaagaagatggctcctgccatggaatcccc

SEQ ID NO: 33 - DNA, 1000 bp, Homo sapiens
cgactccccccgggcccaaagtacgtatgcgccgacccccgctatcccgtcccttccctgaagcctccccagagggcgtgtcaggccgcccggccccgagcgcggccgagacgctgcggcaccgtttccgtgcaaccccgtagcccctttcgaagtgacacacttcacgcaactcggcccggcggcggcggcgcgggccactcacgcagctcagccgcgggaggcgccccggctcttgtggcccgcccgctgtcacccgcaggggcactggcggcgcttgccgccaaggggcagagcgagctcccgagtgggtctggagccgcggagctgggcgggggcgggaaggaggtagcgagaaaagaaactggagaaactcggtggccctcttaacgccgccccagagagaccaggtcggcccccgccgctgccgccgccaccctttttcctggggagttgggggcggggggcgaagcgcggcgcaccgggcggggcggccacgccaggggacgcgggcgtgcaggcgccgtcggggccggggtggcggggcccgcgcggagggcgtgggggcagggaccgcgggcgcccctgcagttgccaagcgtcaccaacaggttgcatcgttccccgcggccgccgcgcggcccctcgggcggggagcggccgggggtggagtgggagcgcgtgtgtgcgagtgtgtgcgcgccgtggcgccgcctccacccgctccccgctcggtcccgctcgctcgcccaggccgggctgccctttcgcgtgtccgcgctctcttccctccgccgccgcctcctccattttgcgagctcgtgtctgtgacgggagcccgagtcaccgcctgcccgtcggggacggattctgtgggtggaaggagacgccgcagccggagcggccgaagcagctgggaccgggacggggcacgcgcgcccggaacctcgacccgcggagcccggcgcggggcggagggctggcttgtcagctgggcaat

SEQ ID NO: 34 - DNA, 1000 bp, Homo sapiens
agcaaacgtttacagagctctggacaaaattgagcgcctatgtgtacatggcaagtgtttttagtgtttgtgtgtttacctgcttgtctgggtgattttgcctttgagagtctggatgagaaatgcatggttaaaggcaattccagacaggaagaaaggcagagaagagggtagaaatgacctctgattcttggggctgagggttcctagagcaaatggcacaatgccacgaggcccgatctatccctatgacggaatctaaggtttcagcaagtatctgctggcttggtcatggcttgctcctcagtttgtaggagactctcccactctcccatctgcgcgctcttatcagtcctgaaaagaacccctggcagccaggagcaggtattcctatcgtccttttcctccctccctcgcctccaccctgttggttttttagattgggctttggaaccaaatttggtgagtgctggcctccaggaaatctggagccctggcgcctaaaccttggtttaggaaagcaggagctattcaggaagcaggggtcctccagggctagagctagcctctcctgccctcgcccacgctgcgccagcacttgtttctccaaagccactaggcaggcgttagcgcgcggtgaggggaggggagaaaaggaaaggggaggggagggaaaaggaggtgggaaggcaaggaggccggcccggtgggggcgggacccgactcgcaaactgttgcatttgctctccacctcccagcgccccctccgagatcccggggagccagcttgctgggagagcgggacggtccggagcaagcccagaggcagaggaggcgacagagggaaaaagggccgagctagccgctccagtgctgtacaggagccgaagggacgcaccacgccagccccagcccggctccagcgacagccaacgcctcttgcagcgcggcggcttcgaagccgccgcccggagctgccctttcctcttcggtgaagttt

SEQ ID NO: 35 - DNA, 1000 bp, Homo sapiens
tgcattttaaaaatctgttagctggaccagaccgacaatgtaacataattgccaaagctttggttcgtgacctgaggttatgtttggtatgaaaaggtcacattttatattcagttttctgaagttttggttgcataaccaacctgtggaaggcatgaacacccatgtgcgccctaaccaaaggtttttctgaatcatccttcacatgagaattcctaatgggaccaagtacagtactgtggtccaacataaacacacaagtcaggctgagagaatctcagaaggttgtggaagggtctatctactttgggagcattttgcagaggaagaaactgaggtcctggcaggttgcattctcctgatggcaaaatgcagctcttcctatatgtataccctgaatctccgcccccttcccctcagatgccccctgtcagttcccccagctgctaaatatagctgtctgtggctggctgcgtatgcaaccgcacaccccattctatctgccctatctcggttacagtgtagtcctccccagggtcatcctatgtacacactacgtatttctagccaacgaggagggggaatcaaacagaaagagagacaaacagagatatatcggagtctggcacggggcacataaggcagcacattagagaaagccggcccctggatccgtctttcgcgtttattttaagcccagtcttccctgggccacctttagcagatcctcgtgcgcccccgccccctggccgtgaaactcagcctctatccagcagcgacgacaagtaaagtaaagttcagggaagctgctctttgggatcgctccaaatcgagttgtgcctggagtgatgtttaagccaatgtcagggcaaggcaacagtccctggccgtcctccagcacctttgtaatgcatatgagctcgggagaccagtacttaaagttggaggcccgggagcccaggagctggcggagggcgttcgtcctgggactgcacttgct

SEQ ID NO: 36 - DNA, 1000 bp, Homo sapiens
gaaatttgggaggggagccatcaaagaagcctgggagcagcagttccagggaaaaaggagaatgtgatggccagagagccaaaagaaaaagtagttgaaggagtgctcagcactaggcatctgaactgaatgctgtggcaggctcactggccacaaacaatagggagctggtggaggccttgacgaggaccatttcaacaaactggtgggcttaaaatccggaagaaacagttgaacaaatcattttgacgccttttataaaccacacaagcttattccaaacccgttactggcctaactgatttaagtccctttcccatctgatcctcagagattctaagggacttagcctatccatgactcttcgtcctgcttctcacctcccatgattgccctaacgatgtgaaagtgctttcaaacaaagatgcccaagaaagaaggtaggcaaatgtgcaagcattagtttgtagtacgctattactgtatttcaccttgcactctctagtttccttcgtgctccctcaatatccaactcttaataaattcatggctcccggtgagcattcatcaattctcattccacgcctttagcccttcccgttcccgcccaactctcgctccctcccctggccaaatctctaacctgcaaggctaattccgaattccaaatcggaagcaagagggcggggccccgtgagaggcgatggattgctccagtccgttcccgacgcactgtgcgcatgcgctggtcctccgcggaccgttcgtgctgcccgcctagaaagggtgaagtggttgtttccgtgacggactgagtacgggtgcctgtcaggctcttgcggaagtccatgcgccattgggagggcctcggccgcggctctgtgcccttgctgctgagggccacttcctgggtcattcctggaccgggagccgggctggggctcacacgggggctcccgcgtggccgtctcggcgcctgcgtgacctccccgccggcggg

SEQ ID NO: 37 - protein, 7 aa, Simian virus 40
PKKKRKV

SEQ ID NO: 38 - protein, 6 aa, Artificial Sequence
  Synthetic construct
GGSGGS

SEQ ID NO: 39 - DNA, 18 bp, Homo sapiens
ggcctggaagggggcggc

SEQ ID NO: 40 - DNA, 18 bp, Homo sapiens
cctgcccttcagggcctg

SEQ ID NO: 41 - DNA, 18 bp, Homo sapiens
ggaggagacggggaggac

SEQ ID NO: 42 - DNA, 18 bp, Homo sapiens
ctcgggcaactactactg

SEQ ID NO: 43 - DNA, 18 bp, Homo sapiens
gaggttcccctgcggggc

SEQ ID NO: 44 - DNA, 18 bp, Homo sapiens
gctgtggggcggctcgag

SEQ ID NO: 45 - DNA, 18 bp, Homo sapiens
agcttcctcttgctgttt

SEQ ID NO: 46 - DNA, 18 bp, Homo sapiens
caccaagcccaggcagag

SEQ ID NO: 47 - DNA, 18 bp, Homo sapiens
gcccagttgggcaccatc

SEQ ID NO: 48 - DNA, 18 bp, Homo sapiens
gtccatgaagaagatggc

SEQ ID NO: 49 - DNA, 18 bp, Homo sapiens
agcgtcgaacggccacag

SEQ ID NO: 50 - DNA, 18 bp, Homo sapiens
cgcgcggagggcgtgggg

SEQ ID NO: 51 - DNA, 18 bp, Homo sapiens
cggggagcggccgggggt

SEQ ID NO: 52 - DNA, 18 bp, Homo sapiens
gcctccacccgctccccg

SEQ ID NO: 53 - DNA, 18 bp, Homo sapiens
ctccagggctagagctag

SEQ ID NO: 54 - DNA, 18 bp, Homo sapiens
ggcccggtgggggcggga

SEQ ID NO: 55 - DNA, 18 bp, Homo sapiens
agcgggacggtccggagc

SEQ ID NO: 56 - DNA, 18 bp, Homo sapiens
gcaggagctattcaggaa

SEQ ID NO: 57 - DNA, 18 bp, Homo sapiens
tccagcagcgacgacaag

SEQ ID NO: 58 - DNA, 18 bp, Homo sapiens
gtccctggccgtcctcca

SEQ ID NO: 59 - DNA, 18 bp, Homo sapiens
gttggaggcccgggagcc

SEQ ID NO: 60 - DNA, 18 bp, Homo sapiens
gaaaaagtagttgaagga

SEQ ID NO: 61 - DNA, 18 bp, Homo sapiens
gtagttgaaggagtgctc

SEQ ID NO: 62 - DNA, 18 bp, Homo sapiens
gacctccccgccggcggg

SEQ ID NO: 63 - DNA, 18 bp, Homo sapiens
cttgcggaagtccatgcg

SEQ ID NO: 64 - protein, 168 aa, Artificial Sequence
  Synthetic construct
GEKPYKCPECGKSFSQSGDLRRHQRTHTGEKPYKCPECGKSFSQSGDLRRHQRTHTGEKPYKCPECGKSFSRSDELVRHQRTHTGEKPYKCPECGKSFSTSGNLVRHQRTHTGEKPYKCPECGKSFSRSDKLTEHQRTHTGEKPYKCPECGKSFSRSDELVRHQRTHT

SEQ ID NO: 65 - protein, 168 aa, Artificial Sequence
  Synthetic construct
GEKPYKCPECGKSFSQSSSLVRHQRTHTGEKPYKCPECGKSFSQSSSLVRHQRTHTGEKPYKCPECGKSFSDCRDLARHQRTHTGEKPYKCPECGKSFSRSDKLVRHQRTHTGEKPYKCPECGKSFSRADNLTEHQRTHTGEKPYKCPECGKSFSQSSSLVRHQRTHT

SEQ ID NO: 66 - protein, 168 aa, Artificial Sequence
  synthetic construct
GEKPYKCPECGKSFSTTGALTEHQRTHTGEKPYKCPECGKSFSDPGHLVRHQRTHTGEKPYKCPECGKSFSSRRTCRAHQRTHTGEKPYKCPECGKSFSRADNLTEHQRTHTGEKPYKCPECGKSFSDPGHLVRHQRTHTGEKPYKCPECGKSFSSRRTCRAHQRTHT

SEQ ID NO: 67 - protein, 168 aa, Artificial Sequence
  synthetic construct
GEKPYKCPECGKSFSTKNSLTEHQRTHTGEKPYKCPECGKSFSDCRDLARHQRTHTGEKPYKCPECGKSFSTSGNLTEHQRTHTGEKPYKCPECGKSFSRSDKLTEHQRTHTGEKPYKCPECGKSFSTSGNLVRHQRTHTGEKPYKCPECGKSFSQNSTLTEHQRTHT

SEQ ID NO: 68 - protein, 168 aa, Artificial Sequence
  synthetic construct
GEKPYKCPECGKSFSSKKHLAEHQRTHTGEKPYKCPECGKSFSDCRDLARHQRTHTGEKPYKCPECGKSFSTSHSLTEHQRTHTGEKPYKCPECGKSFSRADNLTEHQRTHTGEKPYKCPECGKSFSDPGALVRHQRTHTGEKPYKCPECGKSFSQSGHLTEHQRTHT

SEQ ID NO: 69 - protein, 168 aa, Artificial Sequence
  synthetic construct
GEKPYKCPECGKSFSSRRTCRAHQRTHTGEKPYKCPECGKSFSQSSSLVRHQRTHTGEKPYKCPECGKSFSHTGHLLEHQRTHTGEKPYKCPECGKSFSRADNLTEHQRTHTGEKPYKCPECGKSFSRSDELVRHQRTHTGEKPYKCPECGKSFSSRRTCRAHQRTHT

SEQ ID NO: 70 - protein, 168 aa, Artificial Sequence
  synthetic construct
GEKPYKCPECGKSFSRNDALTEHQRTHTGEKPYKCPECGKSFSDPGHLVRHQRTHTGEKPYKCPECGKSFSSRRTCRAHQRTHTGEKPYKCPECGKSFSRSDKLTEHQRTHTGEKPYKCPECGKSFSDCRDLARHQRTHTGEKPYKCPECGKSFSRSDKLTEHQRTHT

SEQ ID NO: 71 - protein, 168 aa, Artificial Sequence
  synthetic construct
GEKPYKCPECGKSFSQSGHLTEHQRTHTGEKPYKCPECGKSFSQSSSLVRHQRTHTGEKPYKCPECGKSFSSRRTCRAHQRTHTGEKPYKCPECGKSFSSRRTCRAHQRTHTGEKPYKCPECGKSFSDCRDLARHQRTHTGEKPYKCPECGKSFSTTGALTEHQRTHT

SEQ ID NO: 72 - protein, 168 aa, Artificial Sequence
  synthetic construct
GEKPYKCPECGKSFSTSHSLTEHQRTHTGEKPYKCPECGKSFSDPGHLVRHQRTHTGEKPYKCPECGKSFSRSDKLTEHQRTHTGEKPYKCPECGKSFSTKNSLTEHQRTHTGEKPYKCPECGKSFSTSGNLVRHQRTHTGEKPYKCPECGKSFSTTGALTEHQRTHT

SEQ ID NO: 73 - protein, 168 aa, Artificial Sequence
  synthetic construct
GEKPYKCPECGKSFSRSDKLTEHQRTHTGEKPYKCPECGKSFSTSGNLVRHQRTHTGEKPYKCPECGKSFSTSGNLTEHQRTHTGEKPYKCPECGKSFSSKKHLAEHQRTHTGEKPYKCPECGKSFSDPGHLVRHQRTHTGEKPYKCPECGKSFSTSHSLTEHQRTHT

SEQ ID NO: 74 - protein, 168 aa, Artificial Sequence
  synthetic construct
GEKPYKCPECGKSFSQSGHLTEHQRTHTGEKPYKCPECGKSFSDCRDLARHQRTHTGEKPYKCPECGKSFSRSDKLTEHQRTHTGEKPYKCPECGKSFSSKKHLAEHQRTHTGEKPYKCPECGKSFSDPGHLVRHQRTHTGEKPYKCPECGKSFSRSDKLTEHQRTHT

SEQ ID NO: 75 - protein, 168 aa, Artificial Sequence
  synthetic construct
GEKPYKCPECGKSFSTKNSLTEHQRTHTGEKPYKCPECGKSFSTSGNLVRHQRTHTGEKPYKCPECGKSFSTKNSLTEHQRTHTGEKPYKCPECGKSFSRNDALTEHQRTHTGEKPYKCPECGKSFSDPGHLVRHQRTHTGEKPYKCPECGKSFSTKNSLTEHQRTHT

SEQ ID NO: 76 - protein, 168 aa, Artificial Sequence
  synthetic construct
GEKPYKCPECGKSFSSRRTCRAHQRTHTGEKPYKCPECGKSFSRSDELVRHQRTHTGEKPYKCPECGKSFSRSDKLTEHQRTHTGEKPYKCPECGKSFSQSGNLTEHQRTHTGEKPYKCPECGKSFSTSGNLVRHQRTHTGEKPYKCPECGKSFSSRRTCRAHQRTHT

SEQ ID NO: 77 - protein, 168 aa, Artificial Sequence
  synthetic construct
GEKPYKCPECGKSFSTKNSLTEHQRTHTGEKPYKCPECGKSFSDCRDLARHQRTHTGEKPYKCPECGKSFSTKNSLTEHQRTHTGEKPYKCPECGKSFSSKKHLAEHQRTHTGEKPYKCPECGKSFSDCRDLARHQRTHTGEKPYKCPECGKSFSTTGALTEHQRTHT

SEQ ID NO: 78 - protein, 168 aa, Artificial Sequence
  synthetic construct
GEKPYKCPECGKSFSRADNLTEHQRTHTGEKPYKCPECGKSFSDPGNLVRHQRTHTGEKPYKCPECGKSFSSRRTCRAHQRTHTGEKPYKCPECGKSFSSKKALTEHQRTHTGEKPYKCPECGKSFSTSGNLVRHQRTHTGEKPYKCPECGKSFSSRRTCRAHQRTHT

SEQ ID NO: 79 - protein, 168 aa, Artificial Sequence
  synthetic construct
GEKPYKCPECGKSFSRSDELVRHQRTHTGEKPYKCPECGKSFSRSDKLVRHQRTHTGEKPYKCPECGKSFSRSDKLVRHQRTHTGEKPYKCPECGKSFSDPGNLVRHQRTHTGEKPYKCPECGKSFSQRAHLERHQRTHTGEKPYKCPECGKSFSTSGNLVRHQRTHT

SEQ ID NO: 80 - protein, 168 aa, Artificial Sequence
  Synthetic construct
GEKPYKCPECGKSFSRSDNLVRHQRTHTGEKPYKCPECGKSFSRSDELVRHQRTHTGEKPYKCPECGKSFSTSGHLVRHQRTHTGEKPYKCPECGKSFSDPGNLVRHQRTHTGEKPYKCPECGKSFSQSSSLVRHQRTHTGEKPYKCPECGKSFSTSGELVRHQRTHT

SEQ ID NO: 81 - protein, 168 aa, Artificial Sequence
  Synthetic construct
GEKPYKCPECGKSFSRSDNLVRHQRTHTGEKPYKCPECGKSFSRSDDLVRHQRTHTGEKPYKCPECGKSFSDPGNLVRHQRTHTGEKPYKCPECGKSFSQRAHLERHQRTHTGEKPYKCPECGKSFSDPGHLVRHQRTHTGEKPYKCPECGKSFSDPGHLVRHQRTHT

SEQ ID NO: 82 - protein, 168 aa, Artificial Sequence
  synthetic construct
GEKPYKCPECGKSFSDPGNLVRHQRTHTGEKPYKCPECGKSFSRSDNLVRHQRTHTGEKPYKCPECGKSFSTSGSLVRHQRTHTGEKPYKCPECGKSFSDPGHLVRHQRTHTGEKPYKCPECGKSFSQSSSLVRHQRTHTGEKPYKCPECGKSFSDPGHLVRHQRTHT

SEQ ID NO: 83 - protein, 168 aa, Artificial Sequence
  synthetic construct
GEKPYKCPECGKSFSDPGNLVRHQRTHTGEKPYKCPECGKSFSRSDNLVRHQRTHTGEKPYKCPECGKSFSDPGHLVRHQRTHTGEKPYKCPECGKSFSDPGHLVRHQRTHTGEKPYKCPECGKSFSQSSSLVRHQRTHTGEKPYKCPECGKSFSDPGHLVRHQRTHT

SEQ ID NO: 84 - protein, 168 aa, Artificial Sequence
  synthetic construct
GEKPYKCPECGKSFSRSDNLVRHQRTHTGEKPYKCPECGKSFSRSDELVRHQRTHTGEKPYKCPECGKSFSDPGNLVRHQRTHTGEKPYKCPECGKSFSQRAHLERHQRTHTGEKPYKCPECGKSFSQRAHLERHQRTHTGEKPYKCPECGKSFSQSSSLVRHQRTHT

SEQ ID NO: 85 - protein, 168 aa, Artificial Sequence
  synthetic construct
GEKPYKCPECGKSFSQSSSLVRHQRTHTGEKPYKCPECGKSFSTSGNLVRHQRTHTGEKPYKCPECGKSFSRSDELVRHQRTHTGEKPYKCPECGKSFSTSGHLVRHQRTHTGEKPYKCPECGKSFSTSGNLVRHQRTHTGEKPYKCPECGKSFSRSDELVRHQRTHT

SEQ ID NO: 86 - protein, 168 aa, Artificial Sequence
  synthetic construct
GEKPYKCPECGKSFSDPGHLVRHQRTHTGEKPYKCPECGKSFSTSGNLVRHQRTHTGEKPYKCPECGKSFSRSDELVRHQRTHTGEKPYKCPECGKSFSTSGHLVRHQRTHTGEKPYKCPECGKSFSTSGNLVRHQRTHTGEKPYKCPECGKSFSRSDELVRHQRTHT

SEQ ID NO: 87 - protein, 168 aa, Artificial Sequence
  synthetic construct
GEKPYKCPECGKSFSRSDNLVRHQRTHTGEKPYKCPECGKSFSRSDKLVRHQRTHTGEKPYKCPECGKSFSTSGNLVRHQRTHTGEKPYKCPECGKSFSDPGHLVRHQRTHTGEKPYKCPECGKSFSQRAHLERHQRTHTGEKPYKCPECGKSFSTSGSLVRHQRTHT

SEQ ID NO: 88 - protein, 168 aa, Artificial Sequence
  synthetic construct
GEKPYKCPECGKSFSDPGNLVRHQRTHTGEKPYKCPECGKSFSRSDNLVRHQRTHTGEKPYKCPECGKSFSTSGHLVRHQRTHTGEKPYKCPECGKSFSDPGHLVRHQRTHTGEKPYKCPECGKSFSQRAHLERHQRTHTGEKPYKCPECGKSFSDPGHLVRHQRTHT

SEQ ID NO: 89 - protein, 168 aa, Artificial Sequence
  synthetic construct
GEKPYKCPECGKSFSTSGSLVRHQRTHTGEKPYKCPECGKSFSTSGHLVRHQRTHTGEKPYKCPECGKSFSRSDELVRHQRTHTGEKPYKCPECGKSFSTSGHLVRHQRTHTGEKPYKCPECGKSFSQSSNLVRHQRTHTGEKPYKCPECGKSFSRSDELVRHQRTHT

SEQ ID NO: 90 - protein, 319 aa, Artificial Sequence
  synthetic construct
MHHHHHHGYGRKKRRQRRRGYPYDVPDYAPCQPMKRLTLGNDIMPKKKRKVGLEPGEKPYKCPECGKSFSRSDELVRHQRTHTGEKPYKCPECGKSFSRSDKLVRHQRTHTGEKPYKCPECGKSFSRSDKLVRHQRTHTGEKPYKCPECGKSFSDPGNLVRHQRTHTGEKPYKCPECGKSFSQRAHLERHQRTHTGEKPYKCPECGKSFSTSGNLVRHQRTHTGGGSGGSEFGRADALDDFDLDMLGSDALDDFDLDMLGSDALDDFDLDMLGSDALDDFDLDMLINGSEQKLISEEDLEQKLISEEDLEQKLISEEDL

SEQ ID NO: 91 - protein, 289 aa, Artificial Sequence
  synthetic construct
MHHHHHHGYGRKKRRQRRRGYPYDVPDYAPCQPMKRLTLGNDIMAAAVRMNIQMLLEAADYLERREREAEHGYASMLPYPKKKRKVGLEPGEKPYKCPECGKSFSRSDELVRHQRTHTGEKPYKCPECGKSFSRSDKLVRHQRTHTGEKPYKCPECGKSFSRSDKLVRHQRTHTGEKPYKCPECGKSFSDPGNLVRHQRTHTGEKPYKCPECGKSFSQRAHLERHQRTHTGEKPYKCPECGKSFSTSGNLVRHQRTHTGEQKLISEEDLEQKLISEEDLEQKLISEEDL

SEQ ID NO: 92 - protein, 319 aa, Artificial Sequence
  synthetic construct
MHHHHHHGYGRKKRRQRRRGYPYDVPDYAPCQPMKRLTLGNDIMPKKKRKVGLEPGEKPYKCPECGKSFSRSDNLVRHQRTHTGEKPYKCPECGKSFSRSDDLVRHQRTHTGEKPYKCPECGKSFSDPGNLVRHQRTHTGEKPYKCPECGKSFSQRAHLERHQRTHTGEKPYKCPECGKSFSDPGHLVRHQRTHTGEKPYKCPECGKSFSDPGHLVRHQRTHTGGGSGGSEFGRADALDDFDLDMLGSDALDDFDLDMLGSDALDDFDLDMLGSDALDDFDLDMLINGSEQKLISEEDLEQKLISEEDLEQKLISEEDL

SEQ ID NO: 93 - protein, 289 aa, Artificial Sequence
  synthetic construct
MHHHHHHGYGRKKRRQRRRGYPYDVPDYAPCQPMKRLTLGNDIMAAAVRMNIQMLLEAADYLERREREAEHGYASMLPYPKKKRKVGLEPGEKPYKCPECGKSFSRSDNLVRHQRTHTGEKPYKCPECGKSFSRSDDLVRHQRTHTGEKPYKCPECGKSFSDPGNLVRHQRTHTGEKPYKCPECGKSFSQRAHLERHQRTHTGEKPYKCPECGKSFSDPGHLVRHQRTHTGEKPYKCPECGKSFSDPGHLVRHQRTHTGEQKLISEEDLEQKLISEEDLEQKLISEEDL

SEQ ID NO: 94 - protein, 319 aa, Artificial Sequence
  synthetic construct
MHHHHHHGYGRKKRRQRRRGYPYDVPDYAPCQPMKRLTLGNDIMPKKKRKVGLEPGEKPYKCPECGKSFSRSDNLVRHQRTHTGEKPYKCPECGKSFSRSDELVRHQRTHTGEKPYKCPECGKSFSTSGHLVRHQRTHTGEKPYKCPECGKSFSDPGNLVRHQRTHTGEKPYKCPECGKSFSQSSSLVRHQRTHTGEKPYKCPECGKSFSTSGELVRHQRTHTGGGSGGSEFGRADALDDFDLDMLGSDALDDFDLDMLGSDALDDFDLDMLGSDALDDFDLDMLINGSEQKLISEEDLEQKLISEEDLEQKLISEEDL

SEQ ID NO: 95 - protein, 289 aa, Artificial Sequence
  synthetic construct
MHHHHHHGYGRKKRRQRRRGYPYDVPDYAPCQPMKRLTLGNDIMAAAVRMNIQMLLEAADYLERREREAEHGYASMLPYPKKKRKVGLEPGEKPYKCPECGKSFSRSDNLVRHQRTHTGEKPYKCPECGKSFSRSDELVRHQRTHTGEKPYKCPECGKSFSTSGHLVRHQRTHTGEKPYKCPECGKSFSDPGNLVRHQRTHTGEKPYKCPECGKSFSQSSSLVRHQRTHTGEKPYKCPECGKSFSTSGELVRHQRTHTGEQKLISEEDLEQKLISEEDLEQKLISEEDL

SEQ ID NO: 96 - protein, 319 aa, Artificial Sequence
  synthetic construct
MHHHHHHGYGRKKRRQRRRGYPYDVPDYAPCQPMKRLTLGNDIMPKKKRKVGLEPGEKPYKCPECGKSFSDPGNLVRHQRTHTGEKPYKCPECGKSFSRSDNLVRHQRTHTGEKPYKCPECGKSFSTSGSLVRHQRTHTGEKPYKCPECGKSFSDPGHLVRHQRTHTGEKPYKCPECGKSFSQSSSLVRHQRTHTGEKPYKCPECGKSFSDPGHLVRHQRTHTGGGSGGSEFGRADALDDFDLDMLGSDALDDFDLDMLGSDALDDFDLDMLGSDALDDFDLDMLINGSEQKLISEEDLEQKLISEEDLEQKLISEEDL

SEQ ID NO: 97 - protein, 289 aa, Artificial Sequence
  synthetic construct
MHHHHHHGYGRKKRRQRRRGYPYDVPDYAPCQPMKRLTLGNDIMAAAVRMNIQMLLEAADYLERREREAEHGYASMLPYPKKKRKVGLEPGEKPYKCPECGKSFSDPGNLVRHQRTHTGEKPYKCPECGKSFSRSDNLVRHQRTHTGEKPYKCPECGKSFSTSGSLVRHQRTHTGEKPYKCPECGKSFSDPGHLVRHQRTHTGEKPYKCPECGKSFSQSSSLVRHQRTHTGEKPYKCPECGKSFSDPGHLVRHQRTHTGEQKLISEEDLEQKLISEEDLEQKLISEEDL

SEQ ID NO: 98 - protein, 319 aa, Artificial Sequence
  synthetic construct
MHHHHHHGYGRKKRRQRRRGYPYDVPDYAPCQPMKRLTLGNDIMPKKKRKVGLEPGEKPYKCPECGKSFSDPGNLVRHQRTHTGEKPYKCPECGKSFSRSDNLVRHQRTHTGEKPYKCPECGKSFSDPGHLVRHQRTHTGEKPYKCPECGKSFSDPGHLVRHQRTHTGEKPYKCPECGKSFSQSSSLVRHQRTHTGEKPYKCPECGKSFSDPGHLVRHQRTHTGGGSGGSEFGRADALDDFDLDMLGSDALDDFDLDMLGSDALDDFDLDMLGSDALDDFDLDMLINGSEQKLISEEDLEQKLISEEDLEQKLISEEDL

SEQ ID NO: 99 - protein, 289 aa, Artificial Sequence
  synthetic construct
MHHHHHHGYGRKKRRQRRRGYPYDVPDYAPCQPMKRLTLGNDIMAAAVRMNIQMLLEAADYLERREREAEHGYASMLPYPKKKRKVGLEPGEKPYKCPECGKSFSDPGNLVRHQRTHTGEKPYKCPECGKSFSRSDNLVRHQRTHTGEKPYKCPECGKSFSDPGHLVRHQRTHTGEKPYKCPECGKSFSDPGHLVRHQRTHTGEKPYKCPECGKSFSQSSSLVRHQRTHTGEKPYKCPECGKSFSDPGHLVRHQRTHTGEQKLISEEDLEQKLISEEDLEQKLISEEDL

SEQ ID NO: 100 - protein, 319 aa, Artificial Sequence
  synthetic construct
MHHHHHHGYGRKKRRQRRRGYPYDVPDYAPCQPMKRLTLGNDIMPKKKRKVGLEPGEKPYKCPECGKSFSRSDNLVRHQRTHTGEKPYKCPECGKSFSRSDELVRHQRTHTGEKPYKCPECGKSFSDPGNLVRHQRTHTGEKPYKCPECGKSFSQRAHLERHQRTHTGEKPYKCPECGKSFSQRAHLERHQRTHTGEKPYKCPECGKSFSQSSSLVRHQRTHTGGGSGGSEFGRADALDDFDLDMLGSDALDDFDLDMLGSDALDDFDLDMLGSDALDDFDLDMLINGSEQKLISEEDLEQKLISEEDLEQKLISEEDL

SEQ ID NO: 101 - protein, 289 aa, Artificial Sequence
  synthetic construct
MHHHHHHGYGRKKRRQRRRGYPYDVPDYAPCQPMKRLTLGNDIMAAAVRMNIQMLLEAADYLERREREAEHGYASMLPYPKKKRKVGLEPGEKPYKCPECGKSFSRSDNLVRHQRTHTGEKPYKCPECGKSFSRSDELVRHQRTHTGEKPYKCPECGKSFSDPGNLVRHQRTHTGEKPYKCPECGKSFSQRAHLERHQRTHTGEKPYKCPECGKSFSQRAHLERHQRTHTGEKPYKCPECGKSFSQSSSLVRHQRTHTGEQKLISEEDLEQKLISEEDLEQKLISEEDL

SEQ ID NO: 102 - protein, 319 aa, Artificial Sequence
  synthetic construct
MHHHHHHGYGRKKRRQRRRGYPYDVPDYAPCQPMKRLTLGNDIMPKKKRKVGLEPGEKPYKCPECGKSFSQSSSLVRHQRTHTGEKPYKCPECGKSFSTSGNLVRHQRTHTGEKPYKCPECGKSFSRSDELVRHQRTHTGEKPYKCPECGKSFSTSGHLVRHQRTHTGEKPYKCPECGKSFSTSGNLVRHQRTHTGEKPYKCPECGKSFSRSDELVRHQRTHTGGGSGGSEFGRADALDDFDLDMLGSDALDDFDLDMLGSDALDDFDLDMLGSDALDDFDLDMLINGSEQKLISEEDLEQKLISEEDLEQKLISEEDL

SEQ ID NO: 103 - protein, 289 aa, Artificial Sequence
  synthetic construct
MHHHHHHGYGRKKRRQRRRGYPYDVPDYAPCQPMKRLTLGNDIMAAAVRMNIQMLLEAADYLERREREAEHGYASMLPYPKKKRKVGLEPGEKPYKCPECGKSFSQSSSLVRHQRTHTGEKPYKCPECGKSFSTSGNLVRHQRTHTGEKPYKCPECGKSFSRSDELVRHQRTHTGEKPYKCPECGKSFSTSGHLVRHQRTHTGEKPYKCPECGKSFSTSGNLVRHQRTHTGEKPYKCPECGKSFSRSDELVRHQRTHTGEQKLISEEDLEQKLISEEDLEQKLISEEDL

SEQ ID NO: 104 - protein, 319 aa, Artificial Sequence
  synthetic construct
MHHHHHHGYGRKKRRQRRRGYPYDVPDYAPCQPMKRLTLGNDIMPKKKRKVGLEPGEKPYKCPECGKSFSDPGHLVRHQRTHTGEKPYKCPECGKSFSTSGNLVRHQRTHTGEKPYKCPECGKSFSRSDELVRHQRTHTGEKPYKCPECGKSFSTSGHLVRHQRTHTGEKPYKCPECGKSFSTSGNLVRHQRTHTGEKPYKCPECGKSFSRSDELVRHQRTHTGGGSGGSEFGRADALDDFDLDMLGSDALDDFDLDMLGSDALDDFDLDMLGSDALDDFDLDMLINGSEQKLISEEDLEQKLISEEDLEQKLISEEDL

SEQ ID NO: 105 - protein, 289 aa, Artificial Sequence
  synthetic construct
MHHHHHHGYGRKKRRQRRRGYPYDVPDYAPCQPMKRLTLGNDIMAAAVRMNIQMLLEAADYLERREREAEHGYASMLPYPKKKRKVGLEPGEKPYKCPECGKSFSDPGHLVRHQRTHTGEKPYKCPECGKSFSTSGNLVRHQRTHTGEKPYKCPECGKSFSRSDELVRHQRTHTGEKPYKCPECGKSFSTSGHLVRHQRTHTGEKPYKCPECGKSFSTSGNLVRHQRTHTGEKPYKCPECGKSFSRSDELVRHQRTHTGEQKLISEEDLEQKLISEEDLEQKLISEEDL

SEQ ID NO: 106 - protein, 319 aa, Artificial Sequence
  synthetic construct
MHHHHHHGYGRKKRRQRRRGYPYDVPDYAPCQPMKRLTLGNDIMPKKKRKVGLEPGEKPYKCPECGKSFSRSDNLVRHQRTHTGEKPYKCPECGKSFSRSDKLVRHQRTHTGEKPYKCPECGKSFSTSGNLVRHQRTHTGEKPYKCPECGKSFSDPGHLVRHQRTHTGEKPYKCPECGKSFSQRAHLERHQRTHTGEKPYKCPECGKSFSTSGSLVRHQRTHTGGGSGGSEFGRADALDDFDLDMLGSDALDDFDLDMLGSDALDDFDLDMLGSDALDDFDLDMLINGSEQKLISEEDLEQKLISEEDLEQKLISEEDL

SEQ ID NO: 107 - protein, 289 aa, Artificial Sequence
  synthetic construct
MHHHHHHGYGRKKRRQRRRGYPYDVPDYAPCQPMKRLTLGNDIMAAAVRMNIQMLLEAADYLERREREAEHGYASMLPYPKKKRKVGLEPGEKPYKCPECGKSFSRSDNLVRHQRTHTGEKPYKCPECGKSFSRSDKLVRHQRTHTGEKPYKCPECGKSFSTSGNLVRHQRTHTGEKPYKCPECGKSFSDPGHLVRHQRTHTGEKPYKCPECGKSFSQRAHLERHQRTHTGEKPYKCPECGKSFSTSGSLVRHQRTHTGEQKLISEEDLEQKLISEEDLEQKLISEEDL

SEQ ID NO: 108 - protein, 319 aa, Artificial Sequence
  synthetic construct
MHHHHHHGYGRKKRRQRRRGYPYDVPDYAPCQPMKRLTLGNDIMPKKKRKVGLEPGEKPYKCPECGKSFSDPGNLVRHQRTHTGEKPYKCPECGKSFSRSDNLVRHQRTHTGEKPYKCPECGKSFSTSGHLVRHQRTHTGEKPYKCPECGKSFSDPGHLVRHQRTHTGEKPYKCPECGKSFSQRAHLERHQRTHTGEKPYKCPECGKSFSDPGHLVRHQRTHTGGGSGGSEFGRADALDDFDLDMLGSDALDDFDLDMLGSDALDDFDLDMLGSDALDDFDLDMLINGSEQKLISEEDLEQKLISEEDLEQKLISEEDL

SEQ ID NO: 109 - protein, 289 aa, Artificial Sequence
  synthetic construct
MHHHHHHGYGRKKRRQRRRGYPYDVPDYAPCQPMKRLTLGNDIMAAAVRMNIQMLLEAADYLERREREAEHGYASMLPYPKKKRKVGLEPGEKPYKCPECGKSFSDPGNLVRHQRTHTGEKPYKCPECGKSFSRSDNLVRHQRTHTGEKPYKCPECGKSFSTSGHLVRHQRTHTGEKPYKCPECGKSFSDPGHLVRHQRTHTGEKPYKCPECGKSFSQRAHLERHQRTHTGEKPYKCPECGKSFSDPGHLVRHQRTHTGEQKLISEEDLEQKLISEEDLEQKLISEEDL

SEQ ID NO: 110 - protein, 319 aa, Artificial Sequence
  synthetic construct
MHHHHHHGYGRKKRRQRRRGYPYDVPDYAPCQPMKRLTLGNDIMPKKKRKVGLEPGEKPYKCPECGKSFSTSGSLVRHQRTHTGEKPYKCPECGKSFSTSGHLVRHQRTHTGEKPYKCPECGKSFSRSDELVRHQRTHTGEKPYKCPECGKSFSTSGHLVRHQRTHTGEKPYKCPECGKSFSQSSNLVRHQRTHTGEKPYKCPECGKSFSRSDELVRHQRTHTGGGSGGSEFGRADALDDFDLDMLGSDALDDFDLDMLGSDALDDFDLDMLGSDALDDFDLDMLINGSEQKLISEEDLEQKLISEEDLEQKLISEEDL

SEQ ID NO: 111 - protein, 289 aa, Artificial Sequence
  synthetic construct
MHHHHHHGYGRKKRRQRRRGYPYDVPDYAPCQPMKRLTLGNDIMAAAVRMNIQMLLEAADYLERREREAEHGYASMLPYPKKKRKVGLEPGEKPYKCPECGKSFSTSGSLVRHQRTHTGEKPYKCPECGKSFSTSGHLVRHQRTHTGEKPYKCPECGKSFSRSDELVRHQRTHTGEKPYKCPECGKSFSTSGHLVRHQRTHTGEKPYKCPECGKSFSQSSNLVRHQRTHTGEKPYKCPECGKSFSRSDELVRHQRTHTGEQKLISEEDLEQKLISEEDLEQKLISEEDL

SEQ ID NO: 112 - protein, 319 aa, Artificial Sequence
  synthetic construct
MHHHHHHGYGRKKRRQRRRGYPYDVPDYAPCQPMKRLTLGNDIMPKKKRKVGLEPGEKPYKCPECGKSFSQSGDLRRHQRTHTGEKPYKCPECGKSFSQSGDLRRHQRTHTGEKPYKCPECGKSFSRSDELVRHQRTHTGEKPYKCPECGKSFSTSGNLVRHQRTHTGEKPYKCPECGKSFSRSDKLTEHQRTHTGEKPYKCPECGKSFSRSDELVRHQRTHTGGGSGGSEFGRADALDDFDLDMLGSDALDDFDLDMLGSDALDDFDLDMLGSDALDDFDLDMLINGSEQKLISEEDLEQKLISEEDLEQKLISEEDL

SEQ ID NO: 113 - protein, 289 aa, Artificial Sequence
  synthetic construct
MHHHHHHGYGRKKRRQRRRGYPYDVPDYAPCQPMKRLTLGNDIMAAAVRMNIQMLLEAADYLERREREAEHGYASMLPYPKKKRKVGLEPGEKPYKCPECGKSFSQSGDLRRHQRTHTGEKPYKCPECGKSFSQSGDLRRHQRTHTGEKPYKCPECGKSFSRSDELVRHQRTHTGEKPYKCPECGKSFSTSGNLVRHQRTHTGEKPYKCPECGKSFSRSDKLTEHQRTHTGEKPYKCPECGKSFSRSDELVRHQRTHTGEQKLISEEDLEQKLISEEDLEQKLISEEDL

SEQ ID NO: 114 - protein, 319 aa, Artificial Sequence
  synthetic construct
MHHHHHHGYGRKKRRQRRRGYPYDVPDYAPCQPMKRLTLGNDIMPKKKRKVGLEPGEKPYKCPECGKSFSQSSSLVRHQRTHTGEKPYKCPECGKSFSQSSSLVRHQRTHTGEKPYKCPECGKSFSDCRDLARHQRTHTGEKPYKCPECGKSFSRSDKLVRHQRTHTGEKPYKCPECGKSFSRADNLTEHQRTHTGEKPYKCPECGKSFSQSSSLVRHQRTHTGGGSGGSEFGRADALDDFDLDMLGSDALDDFDLDMLGSDALDDFDLDMLGSDALDDFDLDMLINGSEQKLISEEDLEQKLISEEDLEQKLISEEDL

SEQ ID NO: 115 - protein, 289 aa, Artificial Sequence
  synthetic construct
MHHHHHHGYGRKKRRQRRRGYPYDVPDYAPCQPMKRLTLGNDIMAAAVRMNIQMLLEAADYLERREREAEHGYASMLPYPKKKRKVGLEPGEKPYKCPECGKSFSQSSSLVRHQRTHTGEKPYKCPECGKSFSQSSSLVRHQRTHTGEKPYKCPECGKSFSDCRDLARHQRTHTGEKPYKCPECGKSFSRSDKLVRHQRTHTGEKPYKCPECGKSFSRADNLTEHQRTHTGEKPYKCPECGKSFSQSSSLVRHQRTHTGEQKLISEEDLEQKLISEEDLEQKLISEEDL

SEQ ID NO: 116 - protein, 319 aa, Artificial Sequence
  synthetic construct
MHHHHHHGYGRKKRRQRRRGYPYDVPDYAPCQPMKRLTLGNDIMPKKKRKVGLEPGEKPYKCPECGKSFSTTGALTEHQRTHTGEKPYKCPECGKSFSDPGHLVRHQRTHTGEKPYKCPECGKSFSSRRTCRAHQRTHTGEKPYKCPECGKSFSRADNLTEHQRTHTGEKPYKCPECGKSFSDPGHLVRHQRTHTGEKPYKCPECGKSFSSRRTCRAHQRTHTGGGSGGSEFGRADALDDFDLDMLGSDALDDFDLDMLGSDALDDFDLDMLGSDALDDFDLDMLINGSEQKLISEEDLEQKLISEEDLEQKLISEEDL

SEQ ID NO: 117 - protein, 289 aa, Artificial Sequence
  synthetic construct
MHHHHHHGYGRKKRRQRRRGYPYDVPDYAPCQPMKRLTLGNDIMAAAVRMNIQMLLEAADYLERREREAEHGYASMLPYPKKKRKVGLEPGEKPYKCPECGKSFSTTGALTEHQRTHTGEKPYKCPECGKSFSDPGHLVRHQRTHTGEKPYKCPECGKSFSSRRTCRAHQRTHTGEKPYKCPECGKSFSRADNLTEHQRTHTGEKPYKCPECGKSFSDPGHLVRHQRTHTGEKPYKCPECGKSFSSRRTCRAHQRTHTGEQKLISEEDLEQKLISEEDLEQKLISEEDL

SEQ ID NO: 118 - protein, 319 aa, Artificial Sequence
  synthetic construct
MHHHHHHGYGRKKRRQRRRGYPYDVPDYAPCQPMKRLTLGNDIMPKKKRKVGLEPGEKPYKCPECGKSFSTKNSLTEHQRTHTGEKPYKCPECGKSFSDCRDLARHQRTHTGEKPYKCPECGKSFSTSGNLTEHQRTHTGEKPYKCPECGKSFSRSDKLTEHQRTHTGEKPYKCPECGKSFSTSGNLVRHQRTHTGEKPYKCPECGKSFSQNSTLTEHQRTHTGGGSGGSEFGRADALDDFDLDMLGSDALDDFDLDMLGSDALDDFDLDMLGSDALDDFDLDMLINGSEQKLISEEDLEQKLISEEDLEQKLISEEDL

SEQ ID NO: 119 - protein, 289 aa, Artificial Sequence
  synthetic construct
MHHHHHHGYGRKKRRQRRRGYPYDVPDYAPCQPMKRLTLGNDIMAAAVRMNIQMLLEAADYLERREREAEHGYASMLPYPKKKRKVGLEPGEKPYKCPECGKSFSTKNSLTEHQRTHTGEKPYKCPECGKSFSDCRDLARHQRTHTGEKPYKCPECGKSFSTSGNLTEHQRTHTGEKPYKCPECGKSFSRSDKLTEHQRTHTGEKPYKCPECGKSFSTSGNLVRHQRTHTGEKPYKCPECGKSFSQNSTLTEHQRTHTGEQKLISEEDLEQKLISEEDLEQKLISEEDL

SEQ ID NO: 120 - protein, 319 aa, Artificial Sequence
  synthetic construct
MHHHHHHGYGRKKRRQRRRGYPYDVPDYAPCQPMKRLTLGNDIMPKKKRKVGLEPGEKPYKCPECGKSFSSKKHLAEHQRTHTGEKPYKCPECGKSFSDCRDLARHQRTHTGEKPYKCPECGKSFSTSHSLTEHQRTHTGEKPYKCPECGKSFSRADNLTEHQRTHTGEKPYKCPECGKSFSDPGALVRHQRTHTGEKPYKCPECGKSFSQSGHLTEHQRTHTGGGSGGSEFGRADALDDFDLDMLGSDALDDFDLDMLGSDALDDFDLDMLGSDALDDFDLDMLINGSEQKLISEEDLEQKLISEEDLEQKLISEEDL

SEQ ID NO: 121 - protein, 289 aa, Artificial Sequence
  synthetic construct
MHHHHHHGYGRKKRRQRRRGYPYDVPDYAPCQPMKRLTLGNDIMAAAVRMNIQMLLEAADYLERREREAEHGYASMLPYPKKKRKVGLEPGEKPYKCPECGKSFSSKKHLAEHQRTHTGEKPYKCPECGKSFSDCRDLARHQRTHTGEKPYKCPECGKSFSTSHSLTEHQRTHTGEKPYKCPECGKSFSRADNLTEHQRTHTGEKPYKCPECGKSFSDPGALVRHQRTHTGEKPYKCPECGKSFSQSGHLTEHQRTHTGEQKLISEEDLEQKLISEEDLEQKLISEEDL

SEQ ID NO: 122 - protein, 319 aa, Artificial Sequence
  synthetic construct
MHHHHHHGYGRKKRRQRRRGYPYDVPDYAPCQPMKRLTLGNDIMPKKKRKVGLEPGEKPYKCPECGKSFSSRRTCRAHQRTHTGEKPYKCPECGKSFSQSSSLVRHQRTHTGEKPYKCPECGKSFSHTGHLLEHQRTHTGEKPYKCPECGKSFSRADNLTEHQRTHTGEKPYKCPECGKSFSRSDELVRHQRTHTGEKPYKCPECGKSFSSRRTCRAHQRTHTGGGSGGSEFGRADALDDFDLDMLGSDALDDFDLDMLGSDALDDFDLDMLGSDALDDFDLDMLINGSEQKLISEEDLEQKLISEEDLEQKLISEEDL

SEQ ID NO: 123 - protein, 289 aa, Artificial Sequence
  synthetic construct
MHHHHHHGYGRKKRRQRRRGYPYDVPDYAPCQPMKRLTLGNDIMAAAVRMNIQMLLEAADYLERREREAEHGYASMLPYPKKKRKVGLEPGEKPYKCPECGKSFSSRRTCRAHQRTHTGEKPYKCPECGKSFSQSSSLVRHQRTHTGEKPYKCPECGKSFSHTGHLLEHQRTHTGEKPYKCPECGKSFSRADNLTEHQRTHTGEKPYKCPECGKSFSRSDELVRHQRTHTGEKPYKCPECGKSFSSRRTCRAHQRTHTGEQKLISEEDLEQKLISEEDLEQKLISEEDL

SEQ ID NO: 124 - protein, 319 aa, Artificial Sequence
  synthetic construct
MHHHHHHGYGRKKRRQRRRGYPYDVPDYAPCQPMKRLTLGNDIMPKKKRKVGLEPGEKPYKCPECGKSFSRNDALTEHQRTHTGEKPYKCPECGKSFSDPGHLVRHQRTHTGEKPYKCPECGKSFSSRRTCRAHQRTHTGEKPYKCPECGKSFSRSDKLTEHQRTHTGEKPYKCPECGKSFSDCRDLARHQRTHTGEKPYKCPECGKSFSRSDKLTEHQRTHTGGGSGGSEFGRADALDDFDLDMLGSDALDDFDLDMLGSDALDDFDLDMLGSDALDDFDLDMLINGSEQKLISEEDLEQKLISEEDLEQKLISEEDL

SEQ ID NO: 125 - protein, 289 aa, Artificial Sequence
  synthetic construct
MHHHHHHGYGRKKRRQRRRGYPYDVPDYAPCQPMKRLTLGNDIMAAAVRMNIQMLLEAADYLERREREAEHGYASMLPYPKKKRKVGLEPGEKPYKCPECGKSFSRNDALTEHQRTHTGEKPYKCPECGKSFSDPGHLVRHQRTHTGEKPYKCPECGKSFSSRRTCRAHQRTHTGEKPYKCPECGKSFSRSDKLTEHQRTHTGEKPYKCPECGKSFSDCRDLARHQRTHTGEKPYKCPECGKSFSRSDKLTEHQRTHTGEQKLISEEDLEQKLISEEDLEQKLISEEDL

SEQ ID NO: 126 - protein, 319 aa, Artificial Sequence
  synthetic construct
MHHHHHHGYGRKKRRQRRRGYPYDVPDYAPCQPMKRLTLGNDIMPKKKRKVGLEPGEKPYKCPECGKSFSQSGHLTEHQRTHTGEKPYKCPECGKSFSQSSSLVRHQRTHTGEKPYKCPECGKSFSSRRTCRAHQRTHTGEKPYKCPECGKSFSSRRTCRAHQRTHTGEKPYKCPECGKSFSDCRDLARHQRTHTGEKPYKCPECGKSFSTTGALTEHQRTHTGGGSGGSEFGRADALDDFDLDMLGSDALDDFDLDMLGSDALDDFDLDMLGSDALDDFDLDMLINGSEQKLISEEDLEQKLISEEDLEQKLISEEDL

SEQ ID NO: 127 - protein, 289 aa, Artificial Sequence
  synthetic construct
MHHHHHHGYGRKKRRQRRRGYPYDVPDYAPCQPMKRLTLGNDIMAAAVRMNIQMLLEAADYLERREREAEHGYASMLPYPKKKRKVGLEPGEKPYKCPECGKSFSQSGHLTEHQRTHTGEKPYKCPECGKSFSQSSSLVRHQRTHTGEKPYKCPECGKSFSSRRTCRAHQRTHTGEKPYKCPECGKSFSSRRTCRAHQRTHTGEKPYKCPECGKSFSDCRDLARHQRTHTGEKPYKCPECGKSFSTTGALTEHQRTHTGEQKLISEEDLEQKLISEEDLEQKLISEEDL

SEQ ID NO: 128 - protein, 319 aa, Artificial Sequence
  synthetic construct
MHHHHHHGYGRKKRRQRRRGYPYDVPDYAPCQPMKRLTLGNDIMPKKKRKVGLEPGEKPYKCPECGKSFSTSHSLTEHQRTHTGEKPYKCPECGKSFSDPGHLVRHQRTHTGEKPYKCPECGKSFSRSDKLTEHQRTHTGEKPYKCPECGKSFSTKNSLTEHQRTHTGEKPYKCPECGKSFSTSGNLVRHQRTHTGEKPYKCPECGKSFSTTGALTEHQRTHTGGGSGGSEFGRADALDDFDLDMLGSDALDDFDLDMLGSDALDDFDLDMLGSDALDDFDLDMLINGSEQKLISEEDLEQKLISEEDLEQKLISEEDL

SEQ ID NO: 129 - protein, 289 aa, Artificial Sequence
  synthetic construct
MHHHHHHGYGRKKRRQRRRGYPYDVPDYAPCQPMKRLTLGNDIMAAAVRMNIQMLLEAADYLERREREAEHGYASMLPYPKKKRKVGLEPGEKPYKCPECGKSFSTSHSLTEHQRTHTGEKPYKCPECGKSFSDPGHLVRHQRTHTGEKPYKCPECGKSFSRSDKLTEHQRTHTGEKPYKCPECGKSFSTKNSLTEHQRTHTGEKPYKCPECGKSFSTSGNLVRHQRTHTGEKPYKCPECGKSFSTTGALTEHQRTHTGEQKLISEEDLEQKLISEEDLEQKLISEEDL

SEQ ID NO: 130 - protein, 319 aa, Artificial Sequence
  synthetic construct
MHHHHHHGYGRKKRRQRRRGYPYDVPDYAPCQPMKRLTLGNDIMPKKKRKVGLEPGEKPYKCPECGKSFSQSGHLTEHQRTHTGEKPYKCPECGKSFSDCRDLARHQRTHTGEKPYKCPECGKSFSRSDKLTEHQRTHTGEKPYKCPECGKSFSSKKHLAEHQRTHTGEKPYKCPECGKSFSDPGHLVRHQRTHTGEKPYKCPECGKSFSRSDKLTEHQRTHTGGGSGGSEFGRADALDDFDLDMLGSDALDDFDLDMLGSDALDDFDLDMLGSDALDDFDLDMLINGSEQKLISEEDLEQKLISEEDLEQKLISEEDL

SEQ ID NO: 131 - protein, 289 aa, Artificial Sequence
  synthetic construct
MHHHHHHGYGRKKRRQRRRGYPYDVPDYAPCQPMKRLTLGNDIMAAAVRMNIQMLLEAADYLERREREAEHGYASMLPYPKKKRKVGLEPGEKPYKCPECGKSFSQSGHLTEHQRTHTGEKPYKCPECGKSFSDCRDLARHQRTHTGEKPYKCPECGKSFSRSDKLTEHQRTHTGEKPYKCPECGKSFSSKKHLAEHQRTHTGEKPYKCPECGKSFSDPGHLVRHQRTHTGEKPYKCPECGKSFSRSDKLTEHQRTHTGEQKLISEEDLEQKLISEEDLEQKLISEEDL

SEQ ID NO: 132 - protein, 319 aa, Artificial Sequence
  synthetic construct
MHHHHHHGYGRKKRRQRRRGYPYDVPDYAPCQPMKRLTLGNDIMPKKKRKVGLEPGEKPYKCPECGKSFSRSDKLTEHQRTHTGEKPYKCPECGKSFSTSGNLVRHQRTHTGEKPYKCPECGKSFSTSGNLTEHQRTHTGEKPYKCPECGKSFSSKKHLAEHQRTHTGEKPYKCPECGKSFSDPGHLVRHQRTHTGEKPYKCPECGKSFSTSHSLTEHQRTHTGGGSGGSEFGRADALDDFDLDMLGSDALDDFDLDMLGSDALDDFDLDMLGSDALDDFDLDMLINGSEQKLISEEDLEQKLISEEDLEQKLISEEDL

SEQ ID NO: 133 - protein, 289 aa, Artificial Sequence
  synthetic construct
MHHHHHHGYGRKKRRQRRRGYPYDVPDYAPCQPMKRLTLGNDIMAAAVRMNIQMLLEAADYLERREREAEHGYASMLPYPKKKRKVGLEPGEKPYKCPECGKSFSRSDKLTEHQRTHTGEKPYKCPECGKSFSTSGNLVRHQRTHTGEKPYKCPECGKSFSTSGNLTEHQRTHTGEKPYKCPECGKSFSSKKHLAEHQRTHTGEKPYKCPECGKSFSDPGHLVRHQRTHTGEKPYKCPECGKSFSTSHSLTEHQRTHTGEQKLISEEDLEQKLISEEDLEQKLISEEDL

SEQ ID NO: 134 - protein, 319 aa, Artificial Sequence
  synthetic construct
MHHHHHHGYGRKKRRQRRRGYPYDVPDYAPCQPMKRLTLGNDIMPKKKRKVGLEPGEKPYKCPECGKSFSTKNSLTEHQRTHTGEKPYKCPECGKSFSTSGNLVRHQRTHTGEKPYKCPECGKSFSTKNSLTEHQRTHTGEKPYKCPECGKSFSRNDALTEHQRTHTGEKPYKCPECGKSFSDPGHLVRHQRTHTGEKPYKCPECGKSFSTKNSLTEHQRTHTGGGSGGSEFGRADALDDFDLDMLGSDALDDFDLDMLGSDALDDFDLDMLGSDALDDFDLDMLINGSEQKLISEEDLEQKLISEEDLEQKLISEEDL

SEQ ID NO: 135 - protein, 289 aa, Artificial Sequence
  synthetic construct
MHHHHHHGYGRKKRRQRRRGYPYDVPDYAPCQPMKRLTLGNDIMAAAVRMNIQMLLEAADYLERREREAEHGYASMLPYPKKKRKVGLEPGEKPYKCPECGKSFSTKNSLTEHQRTHTGEKPYKCPECGKSFSTSGNLVRHQRTHTGEKPYKCPECGKSFSTKNSLTEHQRTHTGEKPYKCPECGKSFSRNDALTEHQRTHTGEKPYKCPECGKSFSDPGHLVRHQRTHTGEKPYKCPECGKSFSTKNSLTEHQRTHTGEQKLISEEDLEQKLISEEDLEQKLISEEDL

SEQ ID NO: 136 - protein, 319 aa, Artificial Sequence
  synthetic construct
MHHHHHHGYGRKKRRQRRRGYPYDVPDYAPCQPMKRLTLGNDIMPKKKRKVGLEPGEKPYKCPECGKSFSSRRTCRAHQRTHTGEKPYKCPECGKSFSRSDELVRHQRTHTGEKPYKCPECGKSFSRSDKLTEHQRTHTGEKPYKCPECGKSFSQSGNLTEHQRTHTGEKPYKCPECGKSFSTSGNLVRHQRTHTGEKPYKCPECGKSFSSRRTCRAHQRTHTGGGSGGSEFGRADALDDFDLDMLGSDALDDFDLDMLGSDALDDFDLDMLGSDALDDFDLDMLINGSEQKLISEEDLEQKLISEEDLEQKLISEEDL

SEQ ID NO: 137 - protein, 289 aa, Artificial Sequence
  synthetic construct
MHHHHHHGYGRKKRRQRRRGYPYDVPDYAPCQPMKRLTLGNDIMAAAVRMNIQMLLEAADYLERREREAEHGYASMLPYPKKKRKVGLEPGEKPYKCPECGKSFSSRRTCRAHQRTHTGEKPYKCPECGKSFSRSDELVRHQRTHTGEKPYKCPECGKSFSRSDKLTEHQRTHTGEKPYKCPECGKSFSQSGNLTEHQRTHTGEKPYKCPECGKSFSTSGNLVRHQRTHTGEKPYKCPECGKSFSSRRTCRAHQRTHTGEQKLISEEDLEQKLISEEDLEQKLISEEDL

SEQ ID NO: 138 - protein, 319 aa, Artificial Sequence
  synthetic construct
MHHHHHHGYGRKKRRQRRRGYPYDVPDYAPCQPMKRLTLGNDIMPKKKRKVGLEPGEKPYKCPECGKSFSTKNSLTEHQRTHTGEKPYKCPECGKSFSDCRDLARHQRTHTGEKPYKCPECGKSFSTKNSLTEHQRTHTGEKPYKCPECGKSFSSKKHLAEHQRTHTGEKPYKCPECGKSFSDCRDLARHQRTHTGEKPYKCPECGKSFSTTGALTEHQRTHTGGGSGGSEFGRADALDDFDLDMLGSDALDDFDLDMLGSDALDDFDLDMLGSDALDDFDLDMLINGSEQKLISEEDLEQKLISEEDLEQKLISEEDL

SEQ ID NO: 139 - protein, 289 aa, Artificial Sequence
  synthetic construct
MHHHHHHGYGRKKRRQRRRGYPYDVPDYAPCQPMKRLTLGNDIMAAAVRMNIQMLLEAADYLERREREAEHGYASMLPYPKKKRKVGLEPGEKPYKCPECGKSFSTKNSLTEHQRTHTGEKPYKCPECGKSFSDCRDLARHQRTHTGEKPYKCPECGKSFSTKNSLTEHQRTHTGEKPYKCPECGKSFSSKKHLAEHQRTHTGEKPYKCPECGKSFSDCRDLARHQRTHTGEKPYKCPECGKSFSTTGALTEHQRTHTGEQKLISEEDLEQKLISEEDLEQKLISEEDL

SEQ ID NO: 140 - protein, 319 aa, Artificial Sequence
  synthetic construct
MHHHHHHGYGRKKRRQRRRGYPYDVPDYAPCQPMKRLTLGNDIMPKKKRKVGLEPGEKPYKCPECGKSFSRADNLTEHQRTHTGEKPYKCPECGKSFSDPGNLVRHQRTHTGEKPYKCPECGKSFSSRRTCRAHQRTHTGEKPYKCPECGKSFSSKKALTEHQRTHTGEKPYKCPECGKSFSTSGNLVRHQRTHTGEKPYKCPECGKSFSSRRTCRAHQRTHTGGGSGGSEFGRADALDDFDLDMLGSDALDDFDLDMLGSDALDDFDLDMLGSDALDDFDLDMLINGSEQKLISEEDLEQKLISEEDLEQKLISEEDL

SEQ ID NO: 141 - protein, 289 aa, Artificial Sequence
  synthetic construct
MHHHHHHGYGRKKRRQRRRGYPYDVPDYAPCQPMKRLTLGNDIMAAAVRMNIQMLLEAADYLERREREAEHGYASMLPYPKKKRKVGLEPGEKPYKCPECGKSFSRADNLTEHQRTHTGEKPYKCPECGKSFSDPGNLVRHQRTHTGEKPYKCPECGKSFSSRRTCRAHQRTHTGEKPYKCPECGKSFSSKKALTEHQRTHTGEKPYKCPECGKSFSTSGNLVRHQRTHTGEKPYKCPECGKSFSSRRTCRAHQRTHTGEQKLISEEDLEQKLISEEDLEQKLISEEDL

SEQ ID NO: 142 - protein, 279 aa, Artificial Sequence
  synthetic construct
MHHHHHHGYGRKKRRQRRRGYPYDVPDYAPWDIMAAAVRMNIQMLLEAADYLERREREAEHGYASMLPYPKKKRKVGLEPGEKPYKCPECGKSFSRSDNLVRHQRTHTGEKPYKCPECGKSFSRSDELVRHQRTHTGEKPYKCPECGKSFSTSGHLVRHQRTHTGEKPYKCPECGKSFSDPGNLVRHQRTHTGEKPYKCPECGKSFSQSSSLVRHQRTHTGEKPYKCPECGKSFSTSGELVRHQRTHTGEQKLISEEDLEQKLISEEDLEQKLISEEDL

SEQ ID NO: 143 - protein, 289 aa, Artificial Sequence
  synthetic construct
MHHHHHHGYGRKKRRQRRRGYPYDVPDYAPCQPMKRLTLGNDIMAAAVRMNIQMLLEAADYLERREREAEHGYASMLPYPKKKRKVGLEPGEKPYKSPESGKSFSRSDNLVRHQRTHTGEKPYKSPESGKSFSRSDELVRHQRTHTGEKPYKSPESGKSFSTSGHLVRHQRTHTGEKPYKSPESGKSFSDPGNLVRHQRTHTGEKPYKSPESGKSFSQSSSLVRHQRTHTGEKPYKSPESGKNFSTSGELVRHQRTHTGEQKLISEEDLEQKLISEEDLEQKLISEEDL

SEQ ID NO: 144 - protein, 168 aa, Artificial Sequence
  Synthetic construct
GEKPYKCPECGKSFSRNDALTEHQRTHTGEKPYKCPECGKSFSTTGALTEHQRTHTGEKPYKCPECGKSFSTSGNLTEHQRTHTGEKPYKCPECGKSFSTTGALTEHQRTHTGEKPYKCPECGKSFSTSGNLVRHQRTHTGEKPYKCPECGKSFSRSDKLTEHQRTHT

SEQ ID NO: 145 - protein, 168 aa, Artificial Sequence
  Synthetic construct
GEKPYKCPECGKSFSTTGALTEHQRTHTGEKPYKCPECGKSFSTKNSLTEHQRTHTGEKPYKCPECGKSFSRSDKLTEHQRTHTGEKPYKCPECGKSFSRSDKLTEHQRTHTGEKPYKCPECGKSFSRSDNLVRHQRTHTGEKPYKCPECGKSFSRSDKLTEHQRTHT

SEQ ID NO: 146 - protein, 168 aa, Artificial Sequence
  Synthetic construct
GEKPYKCPECGKSFSTSGHLVRHQRTHTGEKPYKCPECGKSFSRSDKLTEHQRTHTGEKPYKCPECGKSFSTKNSLTEHQRTHTGEKPYKCPECGKSFSSRRTCRAHQRTHTGEKPYKCPECGKSFSTSGSLVRHQRTHTGEKPYKCPECGKSFSTSGNLVRHQRTHT

SEQ ID NO: 147 - protein, 168 aa, Artificial Sequence
  Synthetic construct
GEKPYKCPECGKSFSTSGHLVRHQRTHTGEKPYKCPECGKSFSRSDKLTEHQRTHTGEKPYKCPECGKSFSRNDALTEHQRTHTGEKPYKCPECGKSFSSRRTCRAHQRTHTGEKPYKCPECGKSFSQSSSLVRHQRTHTGEKPYKCPECGKSFSRSDNLVRHQRTHT

SEQ ID NO: 148 - protein, 319 aa, Artificial Sequence
  synthetic construct
MHHHHHHGYGRKKRRQRRRGYPYDVPDYAPCQPMKRLTLGNDIMPKKKRKVGLEPGEKPYKCPECGKSFSRNDALTEHQRTHTGEKPYKCPECGKSFSTTGALTEHQRTHTGEKPYKCPECGKSFSTSGNLTEHQRTHTGEKPYKCPECGKSFSTTGALTEHQRTHTGEKPYKCPECGKSFSTSGNLVRHQRTHTGEKPYKCPECGKSFSRSDKLTEHQRTHTGGGSGGSEFGRADALDDFDLDMLGSDALDDFDLDMLGSDALDDFDLDMLGSDALDDFDLDMLINGSEQKLISEEDLEQKLISEEDLEQKLISEEDL

SEQ ID NO: 149 - protein, 289 aa, Artificial Sequence
  synthetic construct
MHHHHHHGYGRKKRRQRRRGYPYDVPDYAPCQPMKRLTLGNDIMAAAVRMNIQMLLEAADYLERREREAEHGYASMLPYPKKKRKVGLEPGEKPYKCPECGKSFSRNDALTEHQRTHTGEKPYKCPECGKSFSTTGALTEHQRTHTGEKPYKCPECGKSFSTSGNLTEHQRTHTGEKPYKCPECGKSFSTTGALTEHQRTHTGEKPYKCPECGKSFSTSGNLVRHQRTHTGEKPYKCPECGKSFSRSDKLTEHQRTHTGEQKLISEEDLEQKLISEEDLEQKLISEEDL

SEQ ID NO: 150 - protein, 319 aa, Artificial Sequence
  synthetic construct
MHHHHHHGYGRKKRRQRRRGYPYDVPDYAPCQPMKRLTLGNDIMPKKKRKVGLEPGEKPYKCPECGKSFSTTGALTEHQRTHTGEKPYKCPECGKSFSTKNSLTEHQRTHTGEKPYKCPECGKSFSRSDKLTEHQRTHTGEKPYKCPECGKSFSRSDKLTEHQRTHTGEKPYKCPECGKSFSRSDNLVRHQRTHTGEKPYKCPECGKSFSRSDKLTEHQRTHTGGGSGGSEFGRADALDDFDLDMLGSDALDDFDLDMLGSDALDDFDLDMLGSDALDDFDLDMLINGSEQKLISEEDLEQKLISEEDLEQKLISEEDL

SEQ ID NO: 151 - protein, 289 aa, Artificial Sequence
  synthetic construct
MHHHHHHGYGRKKRRQRRRGYPYDVPDYAPCQPMKRLTLGNDIMAAAVRMNIQMLLEAADYLERREREAEHGYASMLPYPKKKRKVGLEPGEKPYKCPECGKSFSTTGALTEHQRTHTGEKPYKCPECGKSFSTKNSLTEHQRTHTGEKPYKCPECGKSFSRSDKLTEHQRTHTGEKPYKCPECGKSFSRSDKLTEHQRTHTGEKPYKCPECGKSFSRSDNLVRHQRTHTGEKPYKCPECGKSFSRSDKLTEHQRTHTGEQKLISEEDLEQKLISEEDLEQKLISEEDL

SEQ ID NO: 152 - protein, 319 aa, Artificial Sequence
  synthetic construct
MHHHHHHGYGRKKRRQRRRGYPYDVPDYAPCQPMKRLTLGNDIMPKKKRKVGLEPGEKPYKCPECGKSFSTSGHLVRHQRTHTGEKPYKCPECGKSFSRSDKLTEHQRTHTGEKPYKCPECGKSFSTKNSLTEHQRTHTGEKPYKCPECGKSFSSRRTCRAHQRTHTGEKPYKCPECGKSFSTSGSLVRHQRTHTGEKPYKCPECGKSFSTSGNLVRHQRTHTGGGSGGSEFGRADALDDFDLDMLGSDALDDFDLDMLGSDALDDFDLDMLGSDALDDFDLDMLINGSEQKLISEEDLEQKLISEEDLEQKLISEEDL

SEQ ID NO: 153 - protein, 289 aa, Artificial Sequence
  synthetic construct
MHHHHHHGYGRKKRRQRRRGYPYDVPDYAPCQPMKRLTLGNDIMAAAVRMNIQMLLEAADYLERREREAEHGYASMLPYPKKKRKVGLEPGEKPYKCPECGKSFSTSGHLVRHQRTHTGEKPYKCPECGKSFSRSDKLTEHQRTHTGEKPYKCPECGKSFSTKNSLTEHQRTHTGEKPYKCPECGKSFSSRRTCRAHQRTHTGEKPYKCPECGKSFSTSGSLVRHQRTHTGEKPYKCPECGKSFSTSGNLVRHQRTHTGEQKLISEEDLEQKLISEEDLEQKLISEEDL

SEQ ID NO: 154 - protein, 319 aa, Artificial Sequence
  synthetic construct
MHHHHHHGYGRKKRRQRRRGYPYDVPDYAPCQPMKRLTLGNDIMPKKKRKVGLEPGEKPYKCPECGKSFSTSGHLVRHQRTHTGEKPYKCPECGKSFSRSDKLTEHQRTHTGEKPYKCPECGKSFSRNDALTEHQRTHTGEKPYKCPECGKSFSSRRTCRAHQRTHTGEKPYKCPECGKSFSQSSSLVRHQRTHTGEKPYKCPECGKSFSRSDNLVRHQRTHTGGGSGGSEFGRADALDDFDLDMLGSDALDDFDLDMLGSDALDDFDLDMLGSDALDDFDLDMLINGSEQKLISEEDLEQKLISEEDLEQKLISEEDL

SEQ ID NO: 155 - protein, 289 aa, Artificial Sequence
  synthetic construct
MHHHHHHGYGRKKRRQRRRGYPYDVPDYAPCQPMKRLTLGNDIMAAAVRMNIQMLLEAADYLERREREAEHGYASMLPYPKKKRKVGLEPGEKPYKCPECGKSFSTSGHLVRHQRTHTGEKPYKCPECGKSFSRSDKLTEHQRTHTGEKPYKCPECGKSFSRNDALTEHQRTHTGEKPYKCPECGKSFSSRRTCRAHQRTHTGEKPYKCPECGKSFSQSSSLVRHQRTHTGEKPYKCPECGKSFSRSDNLVRHQRTHTGEQKLISEEDLEQKLISEEDLEQKLISEEDL

SEQ ID NO: 156 - protein, 168 aa, Artificial Sequence
  Synthetic construct
GEKPYKCPECGKSFSQRAHLERHQRTHTGEKPYKCPECGKSFSQSGHLTEHQRTHTGEKPYKCPECGKSFSTSGNLTEHQRTHTGEKPYKCPECGKSFSTSGSLVRHQRTHTGEKPYKCPECGKSFSRSDNLVRHQRTHTGEKPYKCPECGKSFSDPGHLVRHQRTHT

SEQ ID NO: 157 - protein, 168 aa, Artificial Sequence
  Synthetic construct
GEKPYKCPECGKSFSDCRDLARHQRTHTGEKPYKCPECGKSFSRADNLTEHQRTHTGEKPYKCPECGKSFSSRRTCRAHQRTHTGEKPYKCPECGKSFSRSDNLVRHQRTHTGEKPYKCPECGKSFSQSSNLVRHQRTHTGEKPYKCPECGKSFSTSGSLVRHQRTHT

SEQ ID NO: 158 - protein, 168 aa, Artificial Sequence
  synthetic construct
GEKPYKCPECGKSFSQSGDLRRHQRTHTGEKPYKCPECGKSFSQSSNLVRHQRTHTGEKPYKCPECGKSFSRSDNLVRHQRTHTGEKPYKCPECGKSFSTTGALTEHQRTHTGEKPYKCPECGKSFSRNDALTEHQRTHTGEKPYKCPECGKSFSHKNALQNHQRTHT

SEQ ID NO: 159 - protein, 168 aa, Artificial Sequence
  synthetic construct
GEKPYKCPECGKSFSQSGDLRRHQRTHTGEKPYKCPECGKSFSQSSNLVRHQRTHTGEKPYKCPECGKSFSRSDNLVRHQRTHTGEKPYKCPECGKSFSTSGNLTEHQRTHTGEKPYKCPECGKSFSRSDKLTEHQRTHTGEKPYKCPECGKSFSHKNALQNHQRTHT

SEQ ID NO: 160 - protein, 168 aa, Artificial Sequence
  Synthetic construct
GEKPYKCPECGKSFSRSDNLVRHQRTHTGEKPYKCPECGKSFSQSGDLRRHQRTHTGEKPYKCPECGKSFSRADNLTEHQRTHTGEKPYKCPECGKSFSQSSSLVRHQRTHTGEKPYKCPECGKSFSTKNSLTEHQRTHTGEKPYKCPECGKSFSRADNLTEHQRTHT

SEQ ID NO: 161 - protein, 168 aa, Artificial Sequence
  Synthetic construct
GEKPYKCPECGKSFSRSDNLVRHQRTHTGEKPYKCPECGKSFSQSSSLVRHQRTHTGEKPYKCPECGKSFSRADNLTEHQRTHTGEKPYKCPECGKSFSQSSSLVRHQRTHTGEKPYKCPECGKSFSQSGNLTEHQRTHTGEKPYKCPECGKSFSTTGALTEHQRTHT

SEQ ID NO: 162 - protein, 319 aa, Artificial Sequence
  synthetic construct
MHHHHHHGYGRKKRRQRRRGYPYDVPDYAPCQPMKRLTLGNDIMPKKKRKVGLEPGEKPYKCPECGKSFSQRAHLERHQRTHTGEKPYKCPECGKSFSQSGHLTEHQRTHTGEKPYKCPECGKSFSTSGNLTEHQRTHTGEKPYKCPECGKSFSTSGSLVRHQRTHTGEKPYKCPECGKSFSRSDNLVRHQRTHTGEKPYKCPECGKSFSDPGHLVRHQRTHTGGGSGGSEFGRADALDDFDLDMLGSDALDDFDLDMLGSDALDDFDLDMLGSDALDDFDLDMLINGSEQKLISEEDLEQKLISEEDLEQKLISEEDL

SEQ ID NO: 163 - protein, 289 aa, Artificial Sequence
  synthetic construct
MHHHHHHGYGRKKRRQRRRGYPYDVPDYAPCQPMKRLTLGNDIMAAAVRMNIQMLLEAADYLERREREAEHGYASMLPYPKKKRKVGLEPGEKPYKCPECGKSFSQRAHLERHQRTHTGEKPYKCPECGKSFSQSGHLTEHQRTHTGEKPYKCPECGKSFSTSGNLTEHQRTHTGEKPYKCPECGKSFSTSGSLVRHQRTHTGEKPYKCPECGKSFSRSDNLVRHQRTHTGEKPYKCPECGKSFSDPGHLVRHQRTHTGEQKLISEEDLEQKLISEEDLEQKLISEEDL

SEQ ID NO: 164 - protein, 319 aa, Artificial Sequence
  synthetic construct
MHHHHHHGYGRKKRRQRRRGYPYDVPDYAPCQPMKRLTLGNDIMPKKKRKVGLEPGEKPYKCPECGKSFSDCRDLARHQRTHTGEKPYKCPECGKSFSRADNLTEHQRTHTGEKPYKCPECGKSFSSRRTCRAHQRTHTGEKPYKCPECGKSFSRSDNLVRHQRTHTGEKPYKCPECGKSFSQSSNLVRHQRTHTGEKPYKCPECGKSFSTSGSLVRHQRTHTGGGSGGSEFGRADALDDFDLDMLGSDALDDFDLDMLGSDALDDFDLDMLGSDALDDFDLDMLINGSEQKLISEEDLEQKLISEEDLEQKLISEEDL

SEQ ID NO: 165 - protein, 289 aa, Artificial Sequence
  synthetic construct
MHHHHHHGYGRKKRRQRRRGYPYDVPDYAPCQPMKRLTLGNDIMAAAVRMNIQMLLEAADYLERREREAEHGYASMLPYPKKKRKVGLEPGEKPYKCPECGKSFSDCRDLARHQRTHTGEKPYKCPECGKSFSRADNLTEHQRTHTGEKPYKCPECGKSFSSRRTCRAHQRTHTGEKPYKCPECGKSFSRSDNLVRHQRTHTGEKPYKCPECGKSFSQSSNLVRHQRTHTGEKPYKCPECGKSFSTSGSLVRHQRTHTGEQKLISEEDLEQKLISEEDLEQKLISEEDL

SEQ ID NO: 166 - protein, 319 aa, Artificial Sequence
  synthetic construct
MHHHHHHGYGRKKRRQRRRGYPYDVPDYAPCQPMKRLTLGNDIMPKKKRKVGLEPGEKPYKCPECGKSFSQSGDLRRHQRTHTGEKPYKCPECGKSFSQSSNLVRHQRTHTGEKPYKCPECGKSFSRSDNLVRHQRTHTGEKPYKCPECGKSFSTTGALTEHQRTHTGEKPYKCPECGKSFSRNDALTEHQRTHTGEKPYKCPECGKSFSHKNALQNHQRTHTGGGSGGSEFGRADALDDFDLDMLGSDALDDFDLDMLGSDALDDFDLDMLGSDALDDFDLDMLINGSEQKLISEEDLEQKLISEEDLEQKLISEEDL

SEQ ID NO: 167 - protein, 289 aa, Artificial Sequence
  synthetic construct
MHHHHHHGYGRKKRRQRRRGYPYDVPDYAPCQPMKRLTLGNDIMAAAVRMNIQMLLEAADYLERREREAEHGYASMLPYPKKKRKVGLEPGEKPYKCPECGKSFSQSGDLRRHQRTHTGEKPYKCPECGKSFSQSSNLVRHQRTHTGEKPYKCPECGKSFSRSDNLVRHQRTHTGEKPYKCPECGKSFSTTGALTEHQRTHTGEKPYKCPECGKSFSRNDALTEHQRTHTGEKPYKCPECGKSFSHKNALQNHQRTHTGEQKLISEEDLEQKLISEEDLEQKLISEEDL

SEQ ID NO: 168 - protein, 319 aa, Artificial Sequence
  synthetic construct
MHHHHHHGYGRKKRRQRRRGYPYDVPDYAPCQPMKRLTLGNDIMPKKKRKVGLEPGEKPYKCPECGKSFSQSGDLRRHQRTHTGEKPYKCPECGKSFSQSSNLVRHQRTHTGEKPYKCPECGKSFSRSDNLVRHQRTHTGEKPYKCPECGKSFSTSGNLTEHQRTHTGEKPYKCPECGKSFSRSDKLTEHQRTHTGEKPYKCPECGKSFSHKNALQNHQRTHTGGGSGGSEFGRADALDDFDLDMLGSDALDDFDLDMLGSDALDDFDLDMLGSDALDDFDLDMLINGSEQKLISEEDLEQKLISEEDLEQKLISEEDL

SEQ ID NO: 169 - protein, 289 aa, Artificial Sequence
  synthetic construct
MHHHHHHGYGRKKRRQRRRGYPYDVPDYAPCQPMKRLTLGNDIMAAAVRMNIQMLLEAADYLERREREAEHGYASMLPYPKKKRKVGLEPGEKPYKCPECGKSFSQSGDLRRHQRTHTGEKPYKCPECGKSFSQSSNLVRHQRTHTGEKPYKCPECGKSFSRSDNLVRHQRTHTGEKPYKCPECGKSFSTSGNLTEHQRTHTGEKPYKCPECGKSFSRSDKLTEHQRTHTGEKPYKCPECGKSFSHKNALQNHQRTHTGEQKLISEEDLEQKLISEEDLEQKLISEEDL

SEQ ID NO: 170 - protein, 319 aa, Artificial Sequence
  synthetic construct
MHHHHHHGYGRKKRRQRRRGYPYDVPDYAPCQPMKRLTLGNDIMPKKKRKVGLEPGEKPYKCPECGKSFSRSDNLVRHQRTHTGEKPYKCPECGKSFSQSGDLRRHQRTHTGEKPYKCPECGKSFSRADNLTEHQRTHTGEKPYKCPECGKSFSQSSSLVRHQRTHTGEKPYKCPECGKSFSTKNSLTEHQRTHTGEKPYKCPECGKSFSRADNLTEHQRTHTGGGSGGSEFGRADALDDFDLDMLGSDALDDFDLDMLGSDALDDFDLDMLGSDALDDFDLDMLINGSEQKLISEEDLEQKLISEEDLEQKLISEEDL

SEQ ID NO: 171 - protein, 289 aa, Artificial Sequence
  synthetic construct
MHHHHHHGYGRKKRRQRRRGYPYDVPDYAPCQPMKRLTLGNDIMAAAVRMNIQMLLEAADYLERREREAEHGYASMLPYPKKKRKVGLEPGEKPYKCPECGKSFSRSDNLVRHQRTHTGEKPYKCPECGKSFSQSGDLRRHQRTHTGEKPYKCPECGKSFSRADNLTEHQRTHTGEKPYKCPECGKSFSQSSSLVRHQRTHTGEKPYKCPECGKSFSTKNSLTEHQRTHTGEKPYKCPECGKSFSRADNLTEHQRTHTGEQKLISEEDLEQKLISEEDLEQKLISEEDL

SEQ ID NO: 172 - protein, 319 aa, Artificial Sequence
  synthetic construct
MHHHHHHGYGRKKRRQRRRGYPYDVPDYAPCQPMKRLTLGNDIMPKKKRKVGLEPGEKPYKCPECGKSFSRSDNLVRHQRTHTGEKPYKCPECGKSFSQSSSLVRHQRTHTGEKPYKCPECGKSFSRADNLTEHQRTHTGEKPYKCPECGKSFSQSSSLVRHQRTHTGEKPYKCPECGKSFSQSGNLTEHQRTHTGEKPYKCPECGKSFSTTGALTEHQRTHTGGGSGGSEFGRADALDDFDLDMLGSDALDDFDLDMLGSDALDDFDLDMLGSDALDDFDLDMLINGSEQKLISEEDLEQKLISEEDLEQKLISEEDL

SEQ ID NO: 173 - protein, 289 aa, Artificial Sequence
  synthetic construct
MHHHHHHGYGRKKRRQRRRGYPYDVPDYAPCQPMKRLTLGNDIMAAAVRMNIQMLLEAADYLERREREAEHGYASMLPYPKKKRKVGLEPGEKPYKCPECGKSFSRSDNLVRHQRTHTGEKPYKCPECGKSFSQSSSLVRHQRTHTGEKPYKCPECGKSFSRADNLTEHQRTHTGEKPYKCPECGKSFSQSSSLVRHQRTHTGEKPYKCPECGKSFSQSGNLTEHQRTHTGEKPYKCPECGKSFSTTGALTEHQRTHTGEQKLISEEDLEQKLISEEDLEQKLISEEDL

SEQ ID NO: 174 - protein, 168 aa, Artificial Sequence
  Synthetic construct
GEKPYKCPECGKSFSDPGHLVRHQRTHTGEKPYKCPECGKSFSRNDALTEHQRTHTGEKPYKCPECGKSFSQSGNLTEHQRTHTGEKPYKCPECGKSFSTSGSLVRHQRTHTGEKPYKCPECGKSFSTSGHLVRHQRTHTGEKPYKCPECGKSFSTSGNLVRHQRTHT

SEQ ID NO: 175 - protein, 168 aa, Artificial Sequence
  Synthetic construct
GEKPYKCPECGKSFSQRAHLERHQRTHTGEKPYKCPECGKSFSRNDALTEHQRTHTGEKPYKCPECGKSFSQSGHLTEHQRTHTGEKPYKCPECGKSFSQSSSLVRHQRTHTGEKPYKCPECGKSFSTSGHLVRHQRTHTGEKPYKCPECGKSFSTSGNLVRHQRTHT

SEQ ID NO: 176 - protein, 168 aa, Artificial Sequence
  Synthetic construct
GEKPYKCPECGKSFSQSGDLRRHQRTHTGEKPYKCPECGKSFSRSDELVRHQRTHTGEKPYKCPECGKSFSDCRDLARHQRTHTGEKPYKCPECGKSFSTSGNLVRHQRTHTGEKPYKCPECGKSFSRADNLTEHQRTHTGEKPYKCPECGKSFSQSSSLVRHQRTHT

SEQ ID NO: 177 - protein, 168 aa, Artificial Sequence
  Synthetic construct
GEKPYKCPECGKSFSQSGDLRRHQRTHTGEKPYKCPECGKSFSRSDELVRHQRTHTGEKPYKCPECGKSFSQSGDLRRHQRTHTGEKPYKCPECGKSFSTSGNLVRHQRTHTGEKPYKCPECGKSFSRSDKLTEHQRTHTGEKPYKCPECGKSFSRSDKLVRHQRTHT

SEQ ID NO: 178 - protein, 319 aa, Artificial Sequence
  synthetic construct
MHHHHHHGYGRKKRRQRRRGYPYDVPDYAPCQPMKRLTLGNDIMPKKKRKVGLEPGEKPYKCPECGKSFSDPGHLVRHQRTHTGEKPYKCPECGKSFSRNDALTEHQRTHTGEKPYKCPECGKSFSQSGNLTEHQRTHTGEKPYKCPECGKSFSTSGSLVRHQRTHTGEKPYKCPECGKSFSTSGHLVRHQRTHTGEKPYKCPECGKSFSTSGNLVRHQRTHTGGGSGGSEFGRADALDDFDLDMLGSDALDDFDLDMLGSDALDDFDLDMLGSDALDDFDLDMLINGSEQKLISEEDLEQKLISEEDLEQKLISEEDL

SEQ ID NO: 179 - protein, 289 aa, Artificial Sequence
  synthetic construct
MHHHHHHGYGRKKRRQRRRGYPYDVPDYAPCQPMKRLTLGNDIMAAAVRMNIQMLLEAADYLERREREAEHGYASMLPYPKKKRKVGLEPGEKPYKCPECGKSFSDPGHLVRHQRTHTGEKPYKCPECGKSFSRNDALTEHQRTHTGEKPYKCPECGKSFSQSGNLTEHQRTHTGEKPYKCPECGKSFSTSGSLVRHQRTHTGEKPYKCPECGKSFSTSGHLVRHQRTHTGEKPYKCPECGKSFSTSGNLVRHQRTHTGEQKLISEEDLEQKLISEEDLEQKLISEEDL

SEQ ID NO: 180 - protein, 319 aa, Artificial Sequence
  synthetic construct
MHHHHHHGYGRKKRRQRRRGYPYDVPDYAPCQPMKRLTLGNDIMPKKKRKVGLEPGEKPYKCPECGKSFSQRAHLERHQRTHTGEKPYKCPECGKSFSRNDALTEHQRTHTGEKPYKCPECGKSFSQSGHLTEHQRTHTGEKPYKCPECGKSFSQSSSLVRHQRTHTGEKPYKCPECGKSFSTSGHLVRHQRTHTGEKPYKCPECGKSFSTSGNLVRHQRTHTGGGSGGSEFGRADALDDFDLDMLGSDALDDFDLDMLGSDALDDFDLDMLGSDALDDFDLDMLINGSEQKLISEEDLEQKLISEEDLEQKLISEEDL

SEQ ID NO: 181 - protein, 279 aa, Artificial Sequence
  synthetic construct
MHHHHHHGYGRKKRRQRRRGYPYDVPDYAPWDIMAAAVRMNIQMLLEAADYLERREREAEHGYASMLPYPKKKRKVGLEPGEKPYKCPECGKSFSQRAHLERHQRTHTGEKPYKCPECGKSFSRNDALTEHQRTHTGEKPYKCPECGKSFSQSGHLTEHQRTHTGEKPYKCPECGKSFSQSSSLVRHQRTHTGEKPYKCPECGKSFSTSGHLVRHQRTHTGEKPYKCPECGKSFSTSGNLVRHQRTHTGEQKLISEEDLEQKLISEEDLEQKLISEEDL

SEQ ID NO: 182 - protein, 319 aa, Artificial Sequence
  synthetic construct
MHHHHHHGYGRKKRRQRRRGYPYDVPDYAPCQPMKRLTLGNDIMPKKKRKVGLEPGEKPYKCPECGKSFSQSGDLRRHQRTHTGEKPYKCPECGKSFSRSDELVRHQRTHTGEKPYKCPECGKSFSDCRDLARHQRTHTGEKPYKCPECGKSFSTSGNLVRHQRTHTGEKPYKCPECGKSFSRADNLTEHQRTHTGEKPYKCPECGKSFSQSSSLVRHQRTHTGGGSGGSEFGRADALDDFDLDMLGSDALDDFDLDMLGSDALDDFDLDMLGSDALDDFDLDMLINGSEQKLISEEDLEQKLISEEDLEQKLISEEDL

SEQ ID NO: 183 - protein, 289 aa, Artificial Sequence
  synthetic construct
MHHHHHHGYGRKKRRQRRRGYPYDVPDYAPCQPMKRLTLGNDIMAAAVRMNIQMLLEAADYLERREREAEHGYASMLPYPKKKRKVGLEPGEKPYKCPECGKSFSQSGDLRRHQRTHTGEKPYKCPECGKSFSRSDELVRHQRTHTGEKPYKCPECGKSFSDCRDLARHQRTHTGEKPYKCPECGKSFSTSGNLVRHQRTHTGEKPYKCPECGKSFSRADNLTEHQRTHTGEKPYKCPECGKSFSQSSSLVRHQRTHTGEQKLISEEDLEQKLISEEDLEQKLISEEDL

SEQ ID NO: 184 - protein, 319 aa, Artificial Sequence
  synthetic construct
MHHHHHHGYGRKKRRQRRRGYPYDVPDYAPCQPMKRLTLGNDIMPKKKRKVGLEPGEKPYKCPECGKSFSQSGDLRRHQRTHTGEKPYKCPECGKSFSRSDELVRHQRTHTGEKPYKCPECGKSFSQSGDLRRHQRTHTGEKPYKCPECGKSFSTSGNLVRHQRTHTGEKPYKCPECGKSFSRSDKLTEHQRTHTGEKPYKCPECGKSFSRSDKLVRHQRTHTGGGSGGSEFGRADALDDFDLDMLGSDALDDFDLDMLGSDALDDFDLDMLGSDALDDFDLDMLINGSEQKLISEEDLEQKLISEEDLEQKLISEEDL

SEQ ID NO: 185 - protein, 289 aa, Artificial Sequence
  synthetic construct
MHHHHHHGYGRKKRRQRRRGYPYDVPDYAPCQPMKRLTLGNDIMAAAVRMNIQMLLEAADYLERREREAEHGYASMLPYPKKKRKVGLEPGEKPYKCPECGKSFSQSGDLRRHQRTHTGEKPYKCPECGKSFSRSDELVRHQRTHTGEKPYKCPECGKSFSQSGDLRRHQRTHTGEKPYKCPECGKSFSTSGNLVRHQRTHTGEKPYKCPECGKSFSRSDKLTEHQRTHTGEKPYKCPECGKSFSRSDKLVRHQRTHTGEQKLISEEDLEQKLISEEDLEQKLISEEDL

SEQ ID NO: 186 - protein, 279 aa, Artificial Sequence
  synthetic construct
MHHHHHHGYGRKKRRQRRRGYPYDVPDYAPWDIMAAAVRMNIQMLLEAADYLERREREAEHGYASMLPYPKKKRKVGLEPGEKPYKCPECGKSFSDPGHLVRHQRTHTGEKPYKCPECGKSFSRNDALTEHQRTHTGEKPYKCPECGKSFSQSGNLTEHQRTHTGEKPYKCPECGKSFSTSGSLVRHQRTHTGEKPYKCPECGKSFSTSGHLVRHQRTHTGEKPYKCPECGKSFSTSGNLVRHQRTHTGEQKLISEEDLEQKLISEEDLEQKLISEEDL

SEQ ID NO: 187 - protein, 289 aa, Artificial Sequence
  synthetic construct
MHHHHHHGYGRKKRRQRRRGYPYDVPDYAPCQPMKRLTLGNDIMAAAVRMNIQMLLEAADYLERREREAEHGYASMLPYPKKKRKVGLEPGEKPYKSPESGKSFSDPGHLVRHQRTHTGEKPYKSPESGKSFSRNDALTEHQRTHTGEKPYKSPESGKSFSQSGNLTEHQRTHTGEKPYKSPESGKSFSTSGSLVRHQRTHTGEKPYKSPESGKSFSTSGHLVRHQRTHTGEKPYKSPESGKSFSTSGNLVRHQRTHTGEQKLISEEDLEQKLISEEDLEQKLISEEDL

SEQ ID NO: 188 - protein, 168 aa, Artificial Sequence
  synthetic construct
GEKPYKCPECGKSFSTKNSLTEHQRTHTGEKPYKCPECGKSFSQSGHLTEHQRTHTGEKPYKCPECGKSFSQSGHLTEHQRTHTGEKPYKCPECGKSFSTSGSLVRHQRTHTGEKPYKCPECGKSFSTSGNLVRHQRTHTGEKPYKCPECGKSFSRSDHLTNHQRTHT

SEQ ID NO: 189 - protein, 319 aa, Artificial Sequence
  synthetic construct
MHHHHHHGYGRKKRRQRRRGYPYDVPDYAPCQPMKRLTLGNDIMPKKKRKVGLEPGEKPYKCPECGKSFSTKNSLTEHQRTHTGEKPYKCPECGKSFSQSGHLTEHQRTHTGEKPYKCPECGKSFSQSGHLTEHQRTHTGEKPYKCPECGKSFSTSGSLVRHQRTHTGEKPYKCPECGKSFSTSGNLVRHQRTHTGEKPYKCPECGKSFSRSDHLTNHQRTHTGGGSGGSEFGRADALDDFDLDMLGSDALDDFDLDMLGSDALDDFDLDMLGSDALDDFDLDMLINGSEQKLISEEDLEQKLISEEDLEQKLISEEDL

SEQ ID NO: 190 - protein, 289 aa, Artificial Sequence
  synthetic construct
MHHHHHHGYGRKKRRQRRRGYPYDVPDYAPCQPMKRLTLGNDIMAAAVRMNIQMLLEAADYLERREREAEHGYASMLPYPKKKRKVGLEPGEKPYKCPECGKSFSTKNSLTEHQRTHTGEKPYKCPECGKSFSQSGHLTEHQRTHTGEKPYKCPECGKSFSQSGHLTEHQRTHTGEKPYKCPECGKSFSTSGSLVRHQRTHTGEKPYKCPECGKSFSTSGNLVRHQRTHTGEKPYKCPECGKSFSRSDHLTNHQRTHTGEQKLISEEDLEQKLISEEDLEQKLISEEDL

SEQ ID NO: 191 - protein, 168 aa, Artificial Sequence
  synthetic construct
GEKPYKCPECGKSFSRSDKLVRHQRTHTGEKPYKCPECGKSFSRSDELVRHQRTHTGEKPYKCPECGKSFSDPGHLVRHQRTHTGEKPYKCPECGKSFSRSDNLVRHQRTHTGEKPYKCPECGKSFSRSDDLVRHQRTHTGEKPYKCPECGKSFSHTGHLLEHQRTHT

SEQ ID NO: 192 - protein, 168 aa, Artificial Sequence
  synthetic construct
GEKPYKCPECGKSFSTSGHLVRHQRTHTGEKPYKCPECGKSFSRSDKLVRHQRTHTGEKPYKCPECGKSFSDCRDLARHQRTHTGEKPYKCPECGKSFSRSDDLVRHQRTHTGEKPYKCPECGKSFSQRAHLERHQRTHTGEKPYKCPECGKSFSRSDKLTEHQRTHT

SEQ ID NO: 193 - protein, 168 aa, Artificial Sequence
  synthetic construct
GEKPYKCPECGKSFSDPGHLVRHQRTHTGEKPYKCPECGKSFSQRAHLERHQRTHTGEKPYKCPECGKSFSTSGHLVRHQRTHTGEKPYKCPECGKSFSRSDDLVRHQRTHTGEKPYKCPECGKSFSQRAHLERHQRTHTGEKPYKCPECGKSFSRSDKLTEHQRTHT

SEQ ID NO: 194 - protein, 319 aa, Artificial Sequence
  synthetic construct
MHHHHHHGYGRKKRRQRRRGYPYDVPDYAPCQPMKRLTLGNDIMPKKKRKVGLEPGEKPYKCPECGKSFSRSDKLVRHQRTHTGEKPYKCPECGKSFSRSDELVRHQRTHTGEKPYKCPECGKSFSDPGHLVRHQRTHTGEKPYKCPECGKSFSRSDNLVRHQRTHTGEKPYKCPECGKSFSRSDDLVRHQRTHTGEKPYKCPECGKSFSHTGHLLEHQRTHTGGGSGGSEFGRADALDDFDLDMLGSDALDDFDLDMLGSDALDDFDLDMLGSDALDDFDLDMLINGSEQKLISEEDLEQKLISEEDLEQKLISEEDL

SEQ ID NO: 195 - protein, 319 aa, Artificial Sequence
  synthetic construct
MHHHHHHGYGRKKRRQRRRGYPYDVPDYAPCQPMKRLTLGNDIMPKKKRKVGLEPGEKPYKCPECGKSFSTSGHLVRHQRTHTGEKPYKCPECGKSFSRSDKLVRHQRTHTGEKPYKCPECGKSFSDCRDLARHQRTHTGEKPYKCPECGKSFSRSDDLVRHQRTHTGEKPYKCPECGKSFSQRAHLERHQRTHTGEKPYKCPECGKSFSRSDKLTEHQRTHTGGGSGGSEFGRADALDDFDLDMLGSDALDDFDLDMLGSDALDDFDLDMLGSDALDDFDLDMLINGSEQKLISEEDLEQKLISEEDLEQKLISEEDL

SEQ ID NO: 196 - protein, 319 aa, Artificial Sequence
  synthetic construct
MHHHHHHGYGRKKRRQRRRGYPYDVPDYAPCQPMKRLTLGNDIMPKKKRKVGLEPGEKPYKCPECGKSFSDPGHLVRHQRTHTGEKPYKCPECGKSFSQRAHLERHQRTHTGEKPYKCPECGKSFSTSGHLVRHQRTHTGEKPYKCPECGKSFSRSDDLVRHQRTHTGEKPYKCPECGKSFSQRAHLERHQRTHTGEKPYKCPECGKSFSRSDKLTEHQRTHTGGGSGGSEFGRADALDDFDLDMLGSDALDDFDLDMLGSDALDDFDLDMLGSDALDDFDLDMLINGSEQKLISEEDLEQKLISEEDLEQKLISEEDL

SEQ ID NO: 197 - protein, 289 aa, Artificial Sequence
  synthetic construct
MHHHHHHGYGRKKRRQRRRGYPYDVPDYAPCQPMKRLTLGNDIMAAAVRMNIQMLLEAADYLERREREAEHGYASMLPYPKKKRKVGLEPGEKPYKCPECGKSFSRSDKLVRHQRTHTGEKPYKCPECGKSFSRSDELVRHQRTHTGEKPYKCPECGKSFSDPGHLVRHQRTHTGEKPYKCPECGKSFSRSDNLVRHQRTHTGEKPYKCPECGKSFSRSDDLVRHQRTHTGEKPYKCPECGKSFSHTGHLLEHQRTHTGEQKLISEEDLEQKLISEEDLEQKLISEEDL

SEQ ID NO: 198 - protein, 289 aa, Artificial Sequence
  synthetic construct
MHHHHHHGYGRKKRRQRRRGYPYDVPDYAPCQPMKRLTLGNDIMAAAVRMNIQMLLEAADYLERREREAEHGYASMLPYPKKKRKVGLEPGEKPYKCPECGKSFSTSGHLVRHQRTHTGEKPYKCPECGKSFSRSDKLVRHQRTHTGEKPYKCPECGKSFSDCRDLARHQRTHTGEKPYKCPECGKSFSRSDDLVRHQRTHTGEKPYKCPECGKSFSQRAHLERHQRTHTGEKPYKCPECGKSFSRSDKLTEHQRTHTGEQKLISEEDLEQKLISEEDLEQKLISEEDL

SEQ ID NO: 199 - protein, 289 aa, Artificial Sequence
  synthetic construct
MHHHHHHGYGRKKRRQRRRGYPYDVPDYAPCQPMKRLTLGNDIMAAAVRMNIQMLLEAADYLERREREAEHGYASMLPYPKKKRKVGLEPGEKPYKCPECGKSFSDPGHLVRHQRTHTGEKPYKCPECGKSFSQRAHLERHQRTHTGEKPYKCPECGKSFSTSGHLVRHQRTHTGEKPYKCPECGKSFSRSDDLVRHQRTHTGEKPYKCPECGKSFSQRAHLERHQRTHTGEKPYKCPECGKSFSRSDKLTEHQRTHTGEQKLISEEDLEQKLISEEDLEQKLISEEDL

SEQ ID NO: 200 - protein, 168 aa, Artificial Sequence
  synthetic construct
GEKPYKCPECGKSFSRSDNLVRHQRTHTGEKPYKCPECGKSFSRNDALTEHQRTHTGEKPYKCPECGKSFSDCRDLARHQRTHTGEKPYKCPECGKSFSQNSTLTEHQRTHTGEKPYKCPECGKSFSTSGELVRHQRTHTGEKPYKCPECGKSFSQNSTLTEHQRTHT

SEQ ID NO: 201 - protein, 168 aa, Artificial Sequence
  synthetic construct
GEKPYKCPECGKSFSQRAHLERHQRTHTGEKPYKCPECGKSFSRSDDLVRHQRTHTGEKPYKCPECGKSFSRSDKLVRHQRTHTGEKPYKCPECGKSFSRSDELVRHQRTHTGEKPYKCPECGKSFSRNDTLTEHQRTHTGEKPYKCPECGKSFSDPGHLVRHQRTHT

SEQ ID NO: 202 - protein, 168 aa, Artificial Sequence
  synthetic construct
GEKPYKCPECGKSFSTSGELVRHQRTHTGEKPYKCPECGKSFSSKKHLAEHQRTHTGEKPYKCPECGKSFSSRRTCRAHQRTHTGEKPYKCPECGKSFSDPGNLVRHQRTHTGEKPYKCPECGKSFSRNDTLTEHQRTHTGEKPYKCPECGKSFSTSGELVRHQRTHT

SEQ ID NO: 203 - protein, 168 aa, Artificial Sequence
  synthetic construct
GEKPYKCPECGKSFSQRAHLERHQRTHTGEKPYKCPECGKSFSRADNLTEHQRTHTGEKPYKCPECGKSFSHKNALQNHQRTHTGEKPYKCPECGKSFSTSGNLVRHQRTHTGEKPYKCPECGKSFSQRAHLERHQRTHTGEKPYKCPECGKSFSQSSSLVRHQRTHT

SEQ ID NO: 204 - protein, 168 aa, Artificial Sequence
  synthetic construct
GEKPYKCPECGKSFSTSGNLVRHQRTHTGEKPYKCPECGKSFSRADNLTEHQRTHTGEKPYKCPECGKSFSHKNALQNHQRTHTGEKPYKCPECGKSFSTSGSLVRHQRTHTGEKPYKCPECGKSFSQRAHLERHQRTHTGEKPYKCPECGKSFSDPGALVRHQRTHT

SEQ ID NO: 205 - protein, 168 aa, Artificial Sequence
  synthetic construct
GEKPYKCPECGKSFSTSGNLVRHQRTHTGEKPYKCPECGKSFSRADNLTEHQRTHTGEKPYKCPECGKSFSHKNALQNHQRTHTGEKPYKCPECGKSFSQSGDLRRHQRTHTGEKPYKCPECGKSFSQRAHLERHQRTHTGEKPYKCPECGKSFSQSSSLVRHQRTHT

SEQ ID NO: 206 - protein, 319 aa, Artificial Sequence
  synthetic construct
MHHHHHHGYGRKKRRQRRRGYPYDVPDYAPCQPMKRLTLGNDIMPKKKRKVGLEPGEKPYKCPECGKSFSRSDNLVRHQRTHTGEKPYKCPECGKSFSRNDALTEHQRTHTGEKPYKCPECGKSFSDCRDLARHQRTHTGEKPYKCPECGKSFSQNSTLTEHQRTHTGEKPYKCPECGKSFSTSGELVRHQRTHTGEKPYKCPECGKSFSQNSTLTEHQRTHTGGGSGGSEFGRADALDDFDLDMLGSDALDDFDLDMLGSDALDDFDLDMLGSDALDDFDLDMLINGSEQKLISEEDLEQKLISEEDLEQKLISEEDL

SEQ ID NO: 207 - protein, 289 aa, Artificial Sequence
  synthetic construct
MHHHHHHGYGRKKRRQRRRGYPYDVPDYAPCQPMKRLTLGNDIMAAAVRMNIQMLLEAADYLERREREAEHGYASMLPYPKKKRKVGLEPGEKPYKCPECGKSFSRSDNLVRHQRTHTGEKPYKCPECGKSFSRNDALTEHQRTHTGEKPYKCPECGKSFSDCRDLARHQRTHTGEKPYKCPECGKSFSQNSTLTEHQRTHTGEKPYKCPECGKSFSTSGELVRHQRTHTGEKPYKCPECGKSFSQNSTLTEHQRTHTGEQKLISEEDLEQKLISEEDLEQKLISEEDL

SEQ ID NO: 208 - protein, 319 aa, Artificial Sequence
  synthetic construct
MHHHHHHGYGRKKRRQRRRGYPYDVPDYAPCQPMKRLTLGNDIMPKKKRKVGLEPGEKPYKCPECGKSFSQRAHLERHQRTHTGEKPYKCPECGKSFSRSDDLVRHQRTHTGEKPYKCPECGKSFSRSDKLVRHQRTHTGEKPYKCPECGKSFSRSDELVRHQRTHTGEKPYKCPECGKSFSRNDTLTEHQRTHTGEKPYKCPECGKSFSDPGHLVRHQRTHTGGGSGGSEFGRADALDDFDLDMLGSDALDDFDLDMLGSDALDDFDLDMLGSDALDDFDLDMLINGSEQKLISEEDLEQKLISEEDLEQKLISEEDL

SEQ ID NO: 209 - protein, 289 aa, Artificial Sequence
  synthetic construct
MHHHHHHGYGRKKRRQRRRGYPYDVPDYAPCQPMKRLTLGNDIMAAAVRMNIQMLLEAADYLERREREAEHGYASMLPYPKKKRKVGLEPGEKPYKCPECGKSFSQRAHLERHQRTHTGEKPYKCPECGKSFSRSDDLVRHQRTHTGEKPYKCPECGKSFSRSDKLVRHQRTHTGEKPYKCPECGKSFSRSDELVRHQRTHTGEKPYKCPECGKSFSRNDTLTEHQRTHTGEKPYKCPECGKSFSDPGHLVRHQRTHTGEQKLISEEDLEQKLISEEDLEQKLISEEDL

SEQ ID NO: 210 - protein, 319 aa, Artificial Sequence
  synthetic construct
MHHHHHHGYGRKKRRQRRRGYPYDVPDYAPCQPMKRLTLGNDIMPKKKRKVGLEPGEKPYKCPECGKSFSTSGELVRHQRTHTGEKPYKCPECGKSFSSKKHLAEHQRTHTGEKPYKCPECGKSFSSRRTCRAHQRTHTGEKPYKCPECGKSFSDPGNLVRHQRTHTGEKPYKCPECGKSFSRNDTLTEHQRTHTGEKPYKCPECGKSFSTSGELVRHQRTHTGGGSGGSEFGRADALDDFDLDMLGSDALDDFDLDMLGSDALDDFDLDMLGSDALDDFDLDMLINGSEQKLISEEDLEQKLISEEDLEQKLISEEDL

SEQ ID NO: 211 - protein, 289 aa, Artificial Sequence
  synthetic construct
MHHHHHHGYGRKKRRQRRRGYPYDVPDYAPCQPMKRLTLGNDIMAAAVRMNIQMLLEAADYLERREREAEHGYASMLPYPKKKRKVGLEPGEKPYKCPECGKSFSTSGELVRHQRTHTGEKPYKCPECGKSFSSKKHLAEHQRTHTGEKPYKCPECGKSFSSRRTCRAHQRTHTGEKPYKCPECGKSFSDPGNLVRHQRTHTGEKPYKCPECGKSFSRNDTLTEHQRTHTGEKPYKCPECGKSFSTSGELVRHQRTHTGEQKLISEEDLEQKLISEEDLEQKLISEEDL

SEQ ID NO: 212 - protein, 319 aa, Artificial Sequence
  synthetic construct
MHHHHHHGYGRKKRRQRRRGYPYDVPDYAPCQPMKRLTLGNDIMPKKKRKVGLEPGEKPYKCPECGKSFSQRAHLERHQRTHTGEKPYKCPECGKSFSRADNLTEHQRTHTGEKPYKCPECGKSFSHKNALQNHQRTHTGEKPYKCPECGKSFSTSGNLVRHQRTHTGEKPYKCPECGKSFSQRAHLERHQRTHTGEKPYKCPECGKSFSQSSSLVRHQRTHTGGGSGGSEFGRADALDDFDLDMLGSDALDDFDLDMLGSDALDDFDLDMLGSDALDDFDLDMLINGSEQKLISEEDLEQKLISEEDLEQKLISEEDL

SEQ ID NO: 213 - protein, 289 aa, Artificial Sequence
  synthetic construct
MHHHHHHGYGRKKRRQRRRGYPYDVPDYAPCQPMKRLTLGNDIMAAAVRMNIQMLLEAADYLERREREAEHGYASMLPYPKKKRKVGLEPGEKPYKCPECGKSFSQRAHLERHQRTHTGEKPYKCPECGKSFSRADNLTEHQRTHTGEKPYKCPECGKSFSHKNALQNHQRTHTGEKPYKCPECGKSFSTSGNLVRHQRTHTGEKPYKCPECGKSFSQRAHLERHQRTHTGEKPYKCPECGKSFSQSSSLVRHQRTHTGEQKLISEEDLEQKLISEEDLEQKLISEEDL

SEQ ID NO: 214 - protein, 319 aa, Artificial Sequence
  synthetic construct
MHHHHHHGYGRKKRRQRRRGYPYDVPDYAPCQPMKRLTLGNDIMPKKKRKVGLEPGEKPYKCPECGKSFSTSGNLVRHQRTHTGEKPYKCPECGKSFSRADNLTEHQRTHTGEKPYKCPECGKSFSHKNALQNHQRTHTGEKPYKCPECGKSFSTSGSLVRHQRTHTGEKPYKCPECGKSFSQRAHLERHQRTHTGEKPYKCPECGKSFSDPGALVRHQRTHTGGGSGGSEFGRADALDDFDLDMLGSDALDDFDLDMLGSDALDDFDLDMLGSDALDDFDLDMLINGSEQKLISEEDLEQKLISEEDLEQKLISEEDL

SEQ ID NO: 215 - protein, 289 aa, Artificial Sequence
  synthetic construct
MHHHHHHGYGRKKRRQRRRGYPYDVPDYAPCQPMKRLTLGNDIMAAAVRMNIQMLLEAADYLERREREAEHGYASMLPYPKKKRKVGLEPGEKPYKCPECGKSFSTSGNLVRHQRTHTGEKPYKCPECGKSFSRADNLTEHQRTHTGEKPYKCPECGKSFSHKNALQNHQRTHTGEKPYKCPECGKSFSTSGSLVRHQRTHTGEKPYKCPECGKSFSQRAHLERHQRTHTGEKPYKCPECGKSFSDPGALVRHQRTHTGEQKLISEEDLEQKLISEEDLEQKLISEEDL

SEQ ID NO: 216 - protein, 319 aa, Artificial Sequence
  synthetic construct
MHHHHHHGYGRKKRRQRRRGYPYDVPDYAPCQPMKRLTLGNDIMPKKKRKVGLEPGEKPYKCPECGKSFSTSGNLVRHQRTHTGEKPYKCPECGKSFSRADNLTEHQRTHTGEKPYKCPECGKSFSHKNALQNHQRTHTGEKPYKCPECGKSFSQSGDLRRHQRTHTGEKPYKCPECGKSFSQRAHLERHQRTHTGEKPYKCPECGKSFSQSSSLVRHQRTHTGGGSGGSEFGRADALDDFDLDMLGSDALDDFDLDMLGSDALDDFDLDMLGSDALDDFDLDMLINGSEQKLISEEDLEQKLISEEDLEQKLISEEDL

SEQ ID NO: 217 - protein, 289 aa, Artificial Sequence
  synthetic construct
MHHHHHHGYGRKKRRQRRRGYPYDVPDYAPCQPMKRLTLGNDIMAAAVRMNIQMLLEAADYLERREREAEHGYASMLPYPKKKRKVGLEPGEKPYKCPECGKSFSTSGNLVRHQRTHTGEKPYKCPECGKSFSRADNLTEHQRTHTGEKPYKCPECGKSFSHKNALQNHQRTHTGEKPYKCPECGKSFSQSGDLRRHQRTHTGEKPYKCPECGKSFSQRAHLERHQRTHTGEKPYKCPECGKSFSQSSSLVRHQRTHTGEQKLISEEDLEQKLISEEDLEQKLISEEDL

SEQ ID NO: 218 - protein, 168 aa, Artificial Sequence
  synthetic construct
GEKPYKCPECGKSFSQRAHLERHQRTHTGEKPYKCPECGKSFSTSGELVRHQRTHTGEKPYKCPECGKSFSTSGELVRHQRTHTGEKPYKCPECGKSFSDPGALVRHQRTHTGEKPYKCPECGKSFSDPGALVRHQRTHTGEKPYKCPECGKSFSTTGALTEHQRTHT

SEQ ID NO: 219 - protein, 168 aa, Artificial Sequence
  synthetic construct
GEKPYKCPECGKSFSTSHSLTEHQRTHTGEKPYKCPECGKSFSTKNSLTEHQRTHTGEKPYKCPECGKSFSSRRTCRAHQRTHTGEKPYKCPECGKSFSDPGHLVRHQRTHTGEKPYKCPECGKSFSTKNSLTEHQRTHTGEKPYKCPECGKSFSDPGALVRHQRTHT

SEQ ID NO: 220 - protein, 168 aa, Artificial Sequence; identical to SEQ ID NO: 219
  synthetic construct

SEQ ID NO: 221 - protein, 319 aa, Artificial Sequence
  synthetic construct
MHHHHHHGYGRKKRRQRRRGYPYDVPDYAPCQPMKRLTLGNDIMPKKKRKVGLEPGEKPYKCPECGKSFSQRAHLERHQRTHTGEKPYKCPECGKSFSTSGELVRHQRTHTGEKPYKCPECGKSFSTSGELVRHQRTHTGEKPYKCPECGKSFSDPGALVRHQRTHTGEKPYKCPECGKSFSDPGALVRHQRTHTGEKPYKCPECGKSFSTTGALTEHQRTHTGGGSGGSEFGRADALDDFDLDMLGSDALDDFDLDMLGSDALDDFDLDMLGSDALDDFDLDMLINGSEQKLISEEDLEQKLISEEDLEQKLISEEDL

SEQ ID NO: 222 - protein, 319 aa, Artificial Sequence
  synthetic construct
MHHHHHHGYGRKKRRQRRRGYPYDVPDYAPCQPMKRLTLGNDIMPKKKRKVGLEPGEKPYKCPECGKSFSTSHSLTEHQRTHTGEKPYKCPECGKSFSTKNSLTEHQRTHTGEKPYKCPECGKSFSSRRTCRAHQRTHTGEKPYKCPECGKSFSDPGHLVRHQRTHTGEKPYKCPECGKSFSTKNSLTEHQRTHTGEKPYKCPECGKSFSDPGALVRHQRTHTGGGSGGSEFGRADALDDFDLDMLGSDALDDFDLDMLGSDALDDFDLDMLGSDALDDFDLDMLINGSEQKLISEEDLEQKLISEEDLEQKLISEEDL

SEQ ID NO: 223 - protein, 319 aa, Artificial Sequence
  synthetic construct
MHHHHHHGYGRKKRRQRRRGYPYDVPDYAPCQPMKRLTLGNDIMPKKKRKVGLEPGEKPYKCPECGKSFSDCRDLARHQRTHTGEKPYKCPECGKSFSQRAHLERHQRTHTGEKPYKCPECGKSFSRNDTLTEHQRTHTGEKPYKCPECGKSFSDPGHLVRHQRTHTGEKPYKCPECGKSFSQRAHLERHQRTHTGEKPYKCPECGKSFSTSGSLVRHQRTHTGGGSGGSEFGRADALDDFDLDMLGSDALDDFDLDMLGSDALDDFDLDMLGSDALDDFDLDMLINGSEQKLISEEDLEQKLISEEDLEQKLISEEDL

SEQ ID NO: 224 - protein, 289 aa, Artificial Sequence
  synthetic construct
MHHHHHHGYGRKKRRQRRRGYPYDVPDYAPCQPMKRLTLGNDIMAAAVRMNIQMLLEAADYLERREREAEHGYASMLPYPKKKRKVGLEPGEKPYKCPECGKSFSQRAHLERHQRTHTGEKPYKCPECGKSFSTSGELVRHQRTHTGEKPYKCPECGKSFSTSGELVRHQRTHTGEKPYKCPECGKSFSDPGALVRHQRTHTGEKPYKCPECGKSFSDPGALVRHQRTHTGEKPYKCPECGKSFSTTGALTEHQRTHTGEQKLISEEDLEQKLISEEDLEQKLISEEDL

SEQ ID NO: 225 - protein, 289 aa, Artificial Sequence
  synthetic construct
MHHHHHHGYGRKKRRQRRRGYPYDVPDYAPCQPMKRLTLGNDIMAAAVRMNIQMLLEAADYLERREREAEHGYASMLPYPKKKRKVGLEPGEKPYKCPECGKSFSTSHSLTEHQRTHTGEKPYKCPECGKSFSTKNSLTEHQRTHTGEKPYKCPECGKSFSSRRTCRAHQRTHTGEKPYKCPECGKSFSDPGHLVRHQRTHTGEKPYKCPECGKSFSTKNSLTEHQRTHTGEKPYKCPECGKSFSDPGALVRHQRTHTGEQKLISEEDLEQKLISEEDLEQKLISEEDL

SEQ ID NO: 226 - protein, 289 aa, Artificial Sequence
  synthetic construct
MHHHHHHGYGRKKRRQRRRGYPYDVPDYAPCQPMKRLTLGNDIMAAAVRMNIQMLLEAADYLERREREAEHGYASMLPYPKKKRKVGLEPGEKPYKCPECGKSFSDCRDLARHQRTHTGEKPYKCPECGKSFSQRAHLERHQRTHTGEKPYKCPECGKSFSRNDTLTEHQRTHTGEKPYKCPECGKSFSDPGHLVRHQRTHTGEKPYKCPECGKSFSQRAHLERHQRTHTGEKPYKCPECGKSFSTSGSLVRHQRTHTGEQKLISEEDLEQKLISEEDLEQKLISEEDL

SEQ ID NO: 227 - protein, 168 aa, Artificial Sequence
  synthetic construct
GEKPYKCPECGKSFSQRAHLERHQRTHTGEKPYKCPECGKSFSQSSNLVRHQRTHTGEKPYKCPECGKSFSTSGSLVRHQRTHTGEKPYKCPECGKSFSQSSSLVRHQRTHTGEKPYKCPECGKSFSQRANLRAHQRTHTGEKPYKCPECGKSFSQSSNLVRHQRTHT

SEQ ID NO: 228 - protein, 168 aa, Artificial Sequence
  synthetic construct
GEKPYKCPECGKSFSDPGALVRHQRTHTGEKPYKCPECGKSFSRSDNLVRHQRTHTGEKPYKCPECGKSFSRSDKLVRHQRTHTGEKPYKCPECGKSFSDPGHLVRHQRTHTGEKPYKCPECGKSFSDCRDLARHQRTHTGEKPYKCPECGKSFSSKKHLAEHQRTHT

SEQ ID NO: 229 - protein, 168 aa, Artificial Sequence
  synthetic construct
GEKPYKCPECGKSFSSKKHLAEHQRTHTGEKPYKCPECGKSFSQSSSLVRHQRTHTGEKPYKCPECGKSFSDPGHLVRHQRTHTGEKPYKCPECGKSFSQRAHLERHQRTHTGEKPYKCPECGKSFSTSGSLVRHQRTHTGEKPYKCPECGKSFSQSSSLVRHQRTHT

SEQ ID NO: 230 - protein, 168 aa, Artificial Sequence
  synthetic construct
GEKPYKCPECGKSFSRNDTLTEHQRTHTGEKPYKCPECGKSFSTSGSLVRHQRTHTGEKPYKCPECGKSFSDPGHLVRHQRTHTGEKPYKCPECGKSFSQRAHLERHQRTHTGEKPYKCPECGKSFSTSGSLVRHQRTHTGEKPYKCPECGKSFSQSSSLVRHQRTHT

SEQ ID NO: 231 - protein, 168 aa, Artificial Sequence
  synthetic construct
GEKPYKCPECGKSFSSKKALTEHQRTHTGEKPYKCPECGKSFSDPGHLVRHQRTHTGEKPYKCPECGKSFSRSDNLVRHQRTHTGEKPYKCPECGKSFSRSDNLVRHQRTHTGEKPYKCPECGKSFSQSSNLVRHQRTHTGEKPYKCPECGKSFSDPGHLVRHQRTHT

SEQ ID NO: 232 - protein, 168 aa, Artificial Sequence
  synthetic construct
GEKPYKCPECGKSFSSKKHLAEHQRTHTGEKPYKCPECGKSFSTSGSLVRHQRTHTGEKPYKCPECGKSFSQRAHLERHQRTHTGEKPYKCPECGKSFSQSSNLVRHQRTHTGEKPYKCPECGKSFSDPGALVRHQRTHTGEKPYKCPECGKSFSTSGSLVRHQRTHT

SEQ ID NO: 233 - protein, 168 aa, Artificial Sequence
  synthetic construct
GEKPYKCPECGKSFSRSDELVRHQRTHTGEKPYKCPECGKSFSRSDELVRHQRTHTGEKPYKCPECGKSFSTSGNLVRHQRTHTGEKPYKCPECGKSFSRSDKLTEHQRTHTGEKPYKCPECGKSFSTSGNLTEHQRTHTGEKPYKCPECGKSFSDPGHLVRHQRTHT

SEQ ID NO: 234 - protein, 168 aa, Artificial Sequence
  synthetic construct
GEKPYKCPECGKSFSRSDELVRHQRTHTGEKPYKCPECGKSFSRSDELVRHQRTHTGEKPYKCPECGKSFSTSGNLVRHQRTHTGEKPYKCPECGKSFSRSDKLTEHQRTHTGEKPYKCPECGKSFSTSGNLTEHQRTHTGEKPYKCPECGKSFSQSSSLVRHQRTHT

SEQ ID NO: 235 - protein, 168 aa, Artificial Sequence
  synthetic construct
GEKPYKCPECGKSFSRSDELVRHQRTHTGEKPYKCPECGKSFSRSDELVRHQRTHTGEKPYKCPECGKSFSTSGNLVRHQRTHTGEKPYKCPECGKSFSRSDKLTEHQRTHTGEKPYKCPECGKSFSTSGNLTEHQRTHTGEKPYKCPECGKSFSDCRDLARHQRTHT

SEQ ID NO: 236 - protein, 168 aa, Artificial Sequence
  synthetic construct
GEKPYKCPECGKSFSRSDELVRHQRTHTGEKPYKCPECGKSFSRSDELVRHQRTHTGEKPYKCPECGKSFSTSGNLVRHQRTHTGEKPYKCPECGKSFSRSDKLTEHQRTHTGEKPYKCPECGKSFSTSGNLTEHQRTHTGEKPYKCPECGKSFSRSDELVRHQRTHT

SEQ ID NO: 237 - protein, 168 aa, Artificial Sequence
  synthetic construct
GEKPYKCPECGKSFSDPGHLVRHQRTHTGEKPYKCPECGKSFSSRRTCRAHQRTHTGEKPYKCPECGKSFSTSGELVRHQRTHTGEKPYKCPECGKSFSQSGDLRRHQRTHTGEKPYKCPECGKSFSRSDNLVRHQRTHTGEKPYKCPECGKSFSSRRTCRAHQRTHT

SEQ ID NO: 238 - protein, 168 aa, Artificial Sequence
  synthetic construct
GEKPYKCPECGKSFSQSSSLVRHQRTHTGEKPYKCPECGKSFSTSGNLTEHQRTHTGEKPYKCPECGKSFSQSSSLVRHQRTHTGEKPYKCPECGKSFSQSSNLVRHQRTHTGEKPYKCPECGKSFSRSDDLVRHQRTHTGEKPYKCPECGKSFSQSGNLTEHQRTHT

SEQ ID NO: 239 - protein, 168 aa, Artificial Sequence; identical to SEQ ID NO: 238
  synthetic construct

SEQ ID NO: 240 - protein, 168 aa, Artificial Sequence
  synthetic construct
GEKPYKCPECGKSFSDPGHLVRHQRTHTGEKPYKCPECGKSFSQSGNLTEHQRTHTGEKPYKCPECGKSFSQSSSLVRHQRTHTGEKPYKCPECGKSFSQSSNLVRHQRTHTGEKPYKCPECGKSFSRSDDLVRHQRTHTGEKPYKCPECGKSFSSKKHLAEHQRTHT

SEQ ID NO: 241 - protein, 168 aa, Artificial Sequence
  synthetic construct
GEKPYKCPECGKSFSDPGHLVRHQRTHTGEKPYKCPECGKSFSRNDALTEHQRTHTGEKPYKCPECGKSFSTSGSLVRHQRTHTGEKPYKCPECGKSFSQSGDLRRHQRTHTGEKPYKCPECGKSFSRSDKLVRHQRTHTGEKPYKCPECGKSFSTTGALTEHQRTHT

SEQ ID NO: 242 - protein, 168 aa, Artificial Sequence
  synthetic construct
GEKPYKCPECGKSFSDPGHLVRHQRTHTGEKPYKCPECGKSFSSRRTCRAHQRTHTGEKPYKCPECGKSFSQRAHLERHQRTHTGEKPYKCPECGKSFSDCRDLARHQRTHTGEKPYKCPECGKSFSQSGDLRRHQRTHTGEKPYKCPECGKSFSTKNSLTEHQRTHT

SEQ ID NO: 243 - protein, 168 aa, Artificial Sequence
  synthetic construct
GEKPYKCPECGKSFSRSDNLVRHQRTHTGEKPYKCPECGKSFSTTGALTEHQRTHTGEKPYKCPECGKSFSRSDELVRHQRTHTGEKPYKCPECGKSFSQSGDLRRHQRTHTGEKPYKCPECGKSFSDPGNLVRHQRTHTGEKPYKCPECGKSFSTKNSLTEHQRTHT

SEQ ID NO: 244 - protein, 168 aa, Artificial Sequence
  synthetic construct
GEKPYKCPECGKSFSRSDDLVRHQRTHTGEKPYKCPECGKSFSSRRTCRAHQRTHTGEKPYKCPECGKSFSRSDDLVRHQRTHTGEKPYKCPECGKSFSTSGSLVRHQRTHTGEKPYKCPECGKSFSTSGELVRHQRTHTGEKPYKCPECGKSFSQNSTLTEHQRTHT

SEQ ID NO: 245 - protein, 319 aa, Artificial Sequence
  synthetic construct
MHHHHHHGYGRKKRRQRRRGYPYDVPDYAPCQPMKRLTLGNDIMPKKKRKVGLEPGEKPYKCPECGKSFSQRAHLERHQRTHTGEKPYKCPECGKSFSQSSNLVRHQRTHTGEKPYKCPECGKSFSTSGSLVRHQRTHTGEKPYKCPECGKSFSQSSSLVRHQRTHTGEKPYKCPECGKSFSQRANLRAHQRTHTGEKPYKCPECGKSFSQSSNLVRHQRTHTGGGSGGSEFGRADALDDFDLDMLGSDALDDFDLDMLGSDALDDFDLDMLGSDALDDFDLDMLINGSEQKLISEEDLEQKLISEEDLEQKLISEEDL

SEQ ID NO: 246 - protein, 319 aa, Artificial Sequence
  synthetic construct
MHHHHHHGYGRKKRRQRRRGYPYDVPDYAPCQPMKRLTLGNDIMPKKKRKVGLEPGEKPYKCPECGKSFSDPGALVRHQRTHTGEKPYKCPECGKSFSRSDNLVRHQRTHTGEKPYKCPECGKSFSRSDKLVRHQRTHTGEKPYKCPECGKSFSDPGHLVRHQRTHTGEKPYKCPECGKSFSDCRDLARHQRTHTGEKPYKCPECGKSFSSKKHLAEHQRTHTGGGSGGSEFGRADALDDFDLDMLGSDALDDFDLDMLGSDALDDFDLDMLGSDALDDFDLDMLINGSEQKLISEEDLEQKLISEEDLEQKLISEEDL

SEQ ID NO: 247 - protein, 319 aa, Artificial Sequence
  synthetic construct
MHHHHHHGYGRKKRRQRRRGYPYDVPDYAPCQPMKRLTLGNDIMPKKKRKVGLEPGEKPYKCPECGKSFSSKKHLAEHQRTHTGEKPYKCPECGKSFSQSSSLVRHQRTHTGEKPYKCPECGKSFSDPGHLVRHQRTHTGEKPYKCPECGKSFSQRAHLERHQRTHTGEKPYKCPECGKSFSTSGSLVRHQRTHTGEKPYKCPECGKSFSQSSSLVRHQRTHTGGGSGGSEFGRADALDDFDLDMLGSDALDDFDLDMLGSDALDDFDLDMLGSDALDDFDLDMLINGSEQKLISEEDLEQKLISEEDLEQKLISEEDL

SEQ ID NO: 248 - protein, 319 aa, Artificial Sequence
  synthetic construct
MHHHHHHGYGRKKRRQRRRGYPYDVPDYAPCQPMKRLTLGNDIMPKKKRKVGLEPGEKPYKCPECGKSFSRNDTLTEHQRTHTGEKPYKCPECGKSFSTSGSLVRHQRTHTGEKPYKCPECGKSFSDPGHLVRHQRTHTGEKPYKCPECGKSFSQRAHLERHQRTHTGEKPYKCPECGKSFSTSGSLVRHQRTHTGEKPYKCPECGKSFSQSSSLVRHQRTHTGGGSGGSEFGRADALDDFDLDMLGSDALDDFDLDMLGSDALDDFDLDMLGSDALDDFDLDMLINGSEQKLISEEDLEQKLISEEDLEQKLISEEDL

SEQ ID NO: 249 - protein, 319 aa, Artificial Sequence
  synthetic construct
MHHHHHHGYGRKKRRQRRRGYPYDVPDYAPCQPMKRLTLGNDIMPKKKRKVGLEPGEKPYKCPECGKSFSSKKALTEHQRTHTGEKPYKCPECGKSFSDPGHLVRHQRTHTGEKPYKCPECGKSFSRSDNLVRHQRTHTGEKPYKCPECGKSFSRSDNLVRHQRTHTGEKPYKCPECGKSFSQSSNLVRHQRTHTGEKPYKCPECGKSFSDPGHLVRHQRTHTGGGSGGSEFGRADALDDFDLDMLGSDALDDFDLDMLGSDALDDFDLDMLGSDALDDFDLDMLINGSEQKLISEEDLEQKLISEEDLEQKLISEEDL

SEQ ID NO: 250 - protein, 319 aa, Artificial Sequence
  synthetic construct
MHHHHHHGYGRKKRRQRRRGYPYDVPDYAPCQPMKRLTLGNDIMPKKKRKVGLEPGEKPYKCPECGKSFSSKKHLAEHQRTHTGEKPYKCPECGKSFSTSGSLVRHQRTHTGEKPYKCPECGKSFSQRAHLERHQRTHTGEKPYKCPECGKSFSQSSNLVRHQRTHTGEKPYKCPECGKSFSDPGALVRHQRTHTGEKPYKCPECGKSFSTSGSLVRHQRTHTGGGSGGSEFGRADALDDFDLDMLGSDALDDFDLDMLGSDALDDFDLDMLGSDALDDFDLDMLINGSEQKLISEEDLEQKLISEEDLEQKLISEEDL

SEQ ID NO: 251 - protein, 319 aa, Artificial Sequence
  synthetic construct
MHHHHHHGYGRKKRRQRRRGYPYDVPDYAPCQPMKRLTLGNDIMPKKKRKVGLEPGEKPYKCPECGKSFSRSDELVRHQRTHTGEKPYKCPECGKSFSRSDELVRHQRTHTGEKPYKCPECGKSFSTSGNLVRHQRTHTGEKPYKCPECGKSFSRSDKLTEHQRTHTGEKPYKCPECGKSFSTSGNLTEHQRTHTGEKPYKCPECGKSFSDPGHLVRHQRTHTGGGSGGSEFGRADALDDFDLDMLGSDALDDFDLDMLGSDALDDFDLDMLGSDALDDFDLDMLINGSEQKLISEEDLEQKLISEEDLEQKLISEEDL

SEQ ID NO: 252 - protein, 319 aa, Artificial Sequence
  synthetic construct
MHHHHHHGYGRKKRRQRRRGYPYDVPDYAPCQPMKRLTLGNDIMPKKKRKVGLEPGEKPYKCPECGKSFSRSDELVRHQRTHTGEKPYKCPECGKSFSRSDELVRHQRTHTGEKPYKCPECGKSFSTSGNLVRHQRTHTGEKPYKCPECGKSFSRSDKLTEHQRTHTGEKPYKCPECGKSFSTSGNLTEHQRTHTGEKPYKCPECGKSFSQSSSLVRHQRTHTGGGSGGSEFGRADALDDFDLDMLGSDALDDFDLDMLGSDALDDFDLDMLGSDALDDFDLDMLINGSEQKLISEEDLEQKLISEEDLEQKLISEEDL

SEQ ID NO: 253 - protein, 319 aa, Artificial Sequence
  synthetic construct
MHHHHHHGYGRKKRRQRRRGYPYDVPDYAPCQPMKRLTLGNDIMPKKKRKVGLEPGEKPYKCPECGKSFSRSDELVRHQRTHTGEKPYKCPECGKSFSRSDELVRHQRTHTGEKPYKCPECGKSFSTSGNLVRHQRTHTGEKPYKCPECGKSFSRSDKLTEHQRTHTGEKPYKCPECGKSFSTSGNLTEHQRTHTGEKPYKCPECGKSFSDCRDLARHQRTHTGGGSGGSEFGRADALDDFDLDMLGSDALDDFDLDMLGSDALDDFDLDMLGSDALDDFDLDMLINGSEQKLISEEDLEQKLISEEDLEQKLISEEDL

SEQ ID NO: 254 - protein, 319 aa, Artificial Sequence
  synthetic construct
MHHHHHHGYGRKKRRQRRRGYPYDVPDYAPCQPMKRLTLGNDIMPKKKRKVGLEPGEKPYKCPECGKSFSRSDELVRHQRTHTGEKPYKCPECGKSFSRSDELVRHQRTHTGEKPYKCPECGKSFSTSGNLVRHQRTHTGEKPYKCPECGKSFSRSDKLTEHQRTHTGEKPYKCPECGKSFSTSGNLTEHQRTHTGEKPYKCPECGKSFSRSDELVRHQRTHTGGGSGGSEFGRADALDDFDLDMLGSDALDDFDLDMLGSDALDDFDLDMLGSDALDDFDLDMLINGSEQKLISEEDLEQKLISEEDLEQKLISEEDL

SEQ ID NO: 255 - protein, 319 aa, Artificial Sequence
  synthetic construct
MHHHHHHGYGRKKRRQRRRGYPYDVPDYAPCQPMKRLTLGNDIMPKKKRKVGLEPGEKPYKCPECGKSFSDPGHLVRHQRTHTGEKPYKCPECGKSFSSRRTCRAHQRTHTGEKPYKCPECGKSFSTSGELVRHQRTHTGEKPYKCPECGKSFSQSGDLRRHQRTHTGEKPYKCPECGKSFSRSDNLVRHQRTHTGEKPYKCPECGKSFSSRRTCRAHQRTHTGGGSGGSEFGRADALDDFDLDMLGSDALDDFDLDMLGSDALDDFDLDMLGSDALDDFDLDMLINGSEQKLISEEDLEQKLISEEDLEQKLISEEDL

SEQ ID NO: 256 - protein, 319 aa, Artificial Sequence
  synthetic construct
MHHHHHHGYGRKKRRQRRRGYPYDVPDYAPCQPMKRLTLGNDIMPKKKRKVGLEPGEKPYKCPECGKSFSQSSSLVRHQRTHTGEKPYKCPECGKSFSTSGNLTEHQRTHTGEKPYKCPECGKSFSQSSSLVRHQRTHTGEKPYKCPECGKSFSQSSNLVRHQRTHTGEKPYKCPECGKSFSRSDDLVRHQRTHTGEKPYKCPECGKSFSQSGNLTEHQRTHTGGGSGGSEFGRADALDDFDLDMLGSDALDDFDLDMLGSDALDDFDLDMLGSDALDDFDLDMLINGSEQKLISEEDLEQKLISEEDLEQKLISEEDL

SEQ ID NO: 257 - protein, 319 aa, Artificial Sequence; identical to SEQ ID NO: 256
  synthetic construct

SEQ ID NO: 258 - protein, 319 aa, Artificial Sequence
  synthetic construct
MHHHHHHGYGRKKRRQRRRGYPYDVPDYAPCQPMKRLTLGNDIMPKKKRKVGLEPGEKPYKCPECGKSFSDPGHLVRHQRTHTGEKPYKCPECGKSFSQSGNLTEHQRTHTGEKPYKCPECGKSFSQSSSLVRHQRTHTGEKPYKCPECGKSFSQSSNLVRHQRTHTGEKPYKCPECGKSFSRSDDLVRHQRTHTGEKPYKCPECGKSFSSKKHLAEHQRTHTGGGSGGSEFGRADALDDFDLDMLGSDALDDFDLDMLGSDALDDFDLDMLGSDALDDFDLDMLINGSEQKLISEEDLEQKLISEEDLEQKLISEEDL

SEQ ID NO: 259 - protein, 319 aa, Artificial Sequence
  synthetic construct
MHHHHHHGYGRKKRRQRRRGYPYDVPDYAPCQPMKRLTLGNDIMPKKKRKVGLEPGEKPYKCPECGKSFSDPGHLVRHQRTHTGEKPYKCPECGKSFSRNDALTEHQRTHTGEKPYKCPECGKSFSTSGSLVRHQRTHTGEKPYKCPECGKSFSQSGDLRRHQRTHTGEKPYKCPECGKSFSRSDKLVRHQRTHTGEKPYKCPECGKSFSTTGALTEHQRTHTGGGSGGSEFGRADALDDFDLDMLGSDALDDFDLDMLGSDALDDFDLDMLGSDALDDFDLDMLINGSEQKLISEEDLEQKLISEEDLEQKLISEEDL

SEQ ID NO: 260 - protein, 319 aa, Artificial Sequence
  synthetic construct
MHHHHHHGYGRKKRRQRRRGYPYDVPDYAPCQPMKRLTLGNDIMPKKKRKVGLEPGEKPYKCPECGKSFSDPGHLVRHQRTHTGEKPYKCPECGKSFSSRRTCRAHQRTHTGEKPYKCPECGKSFSQRAHLERHQRTHTGEKPYKCPECGKSFSDCRDLARHQRTHTGEKPYKCPECGKSFSQSGDLRRHQRTHTGEKPYKCPECGKSFSTKNSLTEHQRTHTGGGSGGSEFGRADALDDFDLDMLGSDALDDFDLDMLGSDALDDFDLDMLGSDALDDFDLDMLINGSEQKLISEEDLEQKLISEEDLEQKLISEEDL

SEQ ID NO: 261 - protein, 319 aa, Artificial Sequence
  synthetic construct
MHHHHHHGYGRKKRRQRRRGYPYDVPDYAPCQPMKRLTLGNDIMPKKKRKVGLEPGEKPYKCPECGKSFSRSDNLVRHQRTHTGEKPYKCPECGKSFSTTGALTEHQRTHTGEKPYKCPECGKSFSRSDELVRHQRTHTGEKPYKCPECGKSFSQSGDLRRHQRTHTGEKPYKCPECGKSFSDPGNLVRHQRTHTGEKPYKCPECGKSFSTKNSLTEHQRTHTGGGSGGSEFGRADALDDFDLDMLGSDALDDFDLDMLGSDALDDFDLDMLGSDALDDFDLDMLINGSEQKLISEEDLEQKLISEEDLEQKLISEEDL

SEQ ID NO: 262 - protein, 319 aa, Artificial Sequence
  synthetic construct
MHHHHHHGYGRKKRRQRRRGYPYDVPDYAPCQPMKRLTLGNDIMPKKKRKVGLEPGEKPYKCPECGKSFSRSDDLVRHQRTHTGEKPYKCPECGKSFSSRRTCRAHQRTHTGEKPYKCPECGKSFSRSDDLVRHQRTHTGEKPYKCPECGKSFSTSGSLVRHQRTHTGEKPYKCPECGKSFSTSGELVRHQRTHTGEKPYKCPECGKSFSQNSTLTEHQRTHTGGGSGGSEFGRADALDDFDLDMLGSDALDDFDLDMLGSDALDDFDLDMLGSDALDDFDLDMLINGSEQKLISEEDLEQKLISEEDLEQKLISEEDL

SEQ ID NO: 263 - protein, 333 aa, Artificial Sequence
  Synthetic construct
MGGRRVRWEVYISRALPISDRDLPISDRDRRRARLVNRQIAWRRHPRCFDLHRRHRDRSSLRTLAFKLKLGTELGSTSPVWWNSADIMAAAVRMNIQMLLEAADYLERREREAEHGYASMLPYPKKKRKVGLEPGEKPYKCPECGKSFSRSDNLVRHQRTHTGEKPYKCPECGKSFSRSDELVRHQRTHTGEKPYKCPECGKSFSTSGHLVRHQRTHTGEKPYKCPECGKSFSDPGNLVRHQRTHTGEKPYKCPECGKSFSQSSSLVRHQRTHTGEKPYKCPECGKSFSTSGELVRHQRTHTGEQKLISEEDLEQKLISEEDLEQKLISEEDL

SEQ ID NO: 264 - DNA, 4513 bp, Artificial Sequence
  Synthetic construct
tcgcgcgtttcggtgatgacggtgaaaacctctgacacatgcagctcccggagacggtcacagcttgtctgtaagcggatgccgggagcagacaagcccgtcagggcgcgtcagcgggtgttggcgggtgtcggggctggcttaactatgcggcatcagagcagattgtactgagagtgcaccatatgcggtgtgaaataccgcacagatgcgtaaggagaaaataccgcatcaggcgccattcgccattcaggctgcgcaactgttgggaagggcgatcggtgcgggcctcttcgctattacgccagctggcgaaagggggatgtgctgcaaggcgattaagttgggtaacgccagggttttcccagtcacgacgttgtaaaacgacggccagtgaattcgagctcggtaccgtatacctcgagcccggggaaaagccatataaatgccccgagtgcggcaaatcattcagccaaagtagcaacttagtaagacaccagcgcacccataccggtaagaaaactagtcttaagctcgagcccggggaaaaaccctataaatgccccgagtgtggtaagtcattctctcaaagcggggatttaagaagacaccagagaacccacaccggtaagaaaactagtggcgcgccctcgagcccggggagaaaccttataaatgcccagaatgcgggaaatcgttcagtcaaagagcacatttagaaagacatcaacggacccacaccggtaagaaaactagtcctaggctcgagcccggggaaaaaccttacaagtgccctgagtgcggcaagagcttctctcaatcaagttcattagtaagacaccagaggactcataccggtaagaaaactagtcctcagcctcgagcccggggagaagccttataagtgccctgagtgtggcaaaagcttcagcgatcctggaaatttagtaagacaccaacgcacccacaccggtaagaaaactagtatgcatctcgagcccggggaaaaaccgtataaatgtcctgagtgcggtaagtctttttccgactgtagagacttagcgagacaccaacgtactcataccggtaaaaagactagttgtacactcgagcccggggaaaaaccgtacaagtgtcctgagtgcgggaagagtttctccgatccgggccacttagtaagacatcagaggacacataccggtaaaaagactagtttcgaactcgagcccggggagaaaccatacaaatgccccgagtgtggaaagtcatttagtgatccaggcgcattagtaagacatcagcggacacataccggtaagaaaactagtgaattcctcgagcccggggagaagccatataaatgtcccgagtgtggcaagtccttttctagatcagataatttagtaagacatcagagaacgcacaccggtaaaaagactagtcaattgctcgagcccggggagaagccatacaagtgtcccgaatgcgggaagtcattctccagaagtgacgatttagtaagacatcagcgcacgcacaccggtaagaaaactagtccatggctcgagcccggggagaagccctacaagtgtccagaatgcggaaagagtttctccagaagtgacaaattagtaagacaccagagaacccataccggtaagaaaactagtcatatgctcgagcccggggagaagccgtacaagtgccctgaatgtggtaagtcattttcgagaagtgatgaattagtaagacaccagcggactcataccggtaaaaagactagtgctagcctcgagcccggggagaagccctataaatgtccagaatgtggaaagtcctttagcacgtcagggaacttagtaagacaccagcgaactcataccggtaagaaaactagtttaattaactcgagcccggggagaaaccatacaagtgtccagagtgcgggaaaagctttagtacaagcggtgagttagtaagacaccaacgaacacacaccggtaaaaagactagtgtttaaacctcgagcccggggaaaagccctacaagtgcccggaatgcggcaagtcttttagcaccagcggacatttagtaagacaccagagaacccacaccggtaaaaagactagtccgcggctcgagcccggggaaaagccctacaagtgtcctgagtgcggaaagtctttctccactagcggttcattagtaagacaccagaggacacacaccggtaaaaagactagtgcatgcgtcgactgcagaggcctgcatgcaagcttggcgtaatcatggtcatagctgtttcctgtgtgaaattgttatccgctcacaattccacacaacatacgagccggaagcataaagtgtaaagcctggggtgcctaatgagtgagctaactcacattaattgcgttgcgctcactgcccgctttccagtcgggaaacctgtcgtgccagctgcattaatgaatcggccaacgcgcggggagaggcggtttgcgtattgggcgctcttccgcttcctcgctcactgactcgctgcgctcggtcgttcggctgcggcgagcggtatcagctcactcaaaggcggtaatacggttatccacagaatcaggggataacgcaggaaagaacatgtgagcaaaaggccagcaaaaggccaggaaccgtaaaaaggccgcgttgctggcgtttttccataggctccgcccccctgacgagcatcacaaaaatcgacgctcaagtcagaggtggcgaaacccgacaggactataaagataccaggcgtttccccctggaagctccctcgtgcgctctcctgttccgaccctgccgcttaccggatacctgtccgcctttctcccttcgggaagcgtggcgctttctcatagctcacgctgtaggtatctcagttcggtgtaggtcgttcgctccaagctgggctgtgtgcacgaaccccccgttcagcccgaccgctgcgccttatccggtaactatcgtcttgagtccaacccggtaagacacgacttatcgccactggcagcagccactggtaacaggattagcagagcgaggtatgtaggcggtgctacagagttcttgaagtggtggcctaactacggctacactagaagaacagtatttggtatctgcgctctgctgaagccagttaccttcggaaaaagagttggtagctcttgatccggcaaacaaaccaccgctggtagcggtggtttttttgtttgcaagcagcagattacgcgcagaaaaaaaggatctcaagaagatcctttgatcttttctacggggtctgacgctcagtggaacgaaaactcacgttaagggattttggtcatgagattatcaaaaaggatcttcacctagatccttttaaattaaaaatgaagttttaaatcaatctaaagtatatatgagtaaacttggtctgacagttaccaatgcttaatcagtgaggcacctatctcagcgatctgtctatttcgttcatccatagttgcctgactccccgtcgtgtagataactacgatacgggagggcttaccatctggccccagtgctgcaatgataccgcgagacccacgctcaccggctccagatttatcagcaataaaccagccagccggaagggccgagcgcagaagtggtcctgcaactttatccgcctccatccagtctattaattgttgccgggaagctagagtaagtagttcgccagttaatagtttgcgcaacgttgttgccattgctacaggcatcgtggtgtcacgctcgtcgtttggtatggcttcattcagctccggttcccaacgatcaaggcgagttacatgatcccccatgttgtgcaaaaaagcggttagctccttcggtcctccgatcgttgtcagaagtaagttggccgcagtgttatcactcatggttatggcagcactgcataattctcttactgtcatgccatccgtaagatgcttttctgtgactggtgagtactcaaccaagtcattctgagaatagtgtatgcggcgaccgagttgctcttgcccggcgtcaatacgggataataccgcgccacatagcagaactttaaaagtgctcatcattggaaaacgttcttcggggcgaaaactctcaaggatcttaccgctgttgagatccagttcgatgtaacccactcgtgcacccaactgatcttcagcatcttttactttcaccagcgtttctgggtgagcaaaaacaggaaggcaaaatgccgcaaaaaagggaataagggcgacacggaaatgttgaatactcatactcttcctttttcaatattattgaagcatttatcagggttattgtctcatgagcggatacatatttgaatgtatttagaaaaataaacaaataggggttccgcgcacatttccccgaaaagtgccacctgacgtctaagaaaccattattatcatgacattaacctataaaaataggcgtatcacgaggccctttcgtc

SEQ ID NO: 265 - DNA, 4442 bp, Artificial Sequence
  Synthetic construct
tcgcgcgtttcggtgatgacggtgaaaacctctgacacatgcagctcccggagacggtcacagcttgtctgtaagcggatgccgggagcagacaagcccgtcagggcgcgtcagcgggtgttggcgggtgtcggggctggcttaactatgcggcatcagagcagattgtactgagagtgcaccatatgcggtgtgaaataccgcacagatgcgtaaggagaaaataccgcatcaggcgccattcgccattcaggctgcgcaactgttgggaagggcgatcggtgcgggcctcttcgctattacgccagctggcgaaagggggatgtgctgcaaggcgattaagttgggtaacgccagggttttcccagtcacgacgttgtaaaacgacggccagtgaattcgagctcggtacctcgcgaatgcatctagatgtatacctcgagcccggggagaagccctataaatgccctgaatgcgggaaatctttctcttctaagaaggcactcacagaacaccagcggacacacaccggtaaaaaaactagtcttaagctcgagcccggggaaaagccctacaagtgccccgaatgcgggaagtcttttagtcagagtggaaatcttaccgagcaccagagaacacacaccggtaagaagactagtggcgcgccctcgagcccggggagaagccatacaagtgccctgaatgtggcaagtccttttcaagagccgataacctgacagaacaccaaaggacgcataccggtaagaaaactagtcctaggctcgagcccggggagaagccctataaatgccctgaatgtggcaagagcttcagtactagcgggaatctcactgaacatcagcgaactcataccggtaaaaaaactagtcctcagcctcgagcccggggaaaaaccatacaagtgccctgagtgcggcaagagttttagtacctcacactctcttacagaacatcagcgaacccacaccggtaaaaaaactagtatgcatctcgagcccggggagaaaccatacaaatgtcccgaatgtggcaagagtttcagcagtaaaaagcatctcgctgagcatcagagaactcacaccggtaaaaagactagttgtacactcgagcccggggaaaagccctacaaatgccccgaatgtggtaagtctttttctaggaacgacaccttgacagaacaccagcggacccacaccggtaagaagactagtgaattcctcgagcccggggagaagccttataagtgccccgaatgtggaaagagtttctctactaagaatagcctgaccgagcaccagcgcactcacaccggtaagaaaactagtcaattgctcgagcccggggagaagccctataaatgccctgaatgcgggaaatctttctctcaatcaggccacctcacagaacaccagcggacacacaccggtaaaaaaactagtccatggctcgagcccggggagaaaccctataagtgtcccgaatgcgggaaatcattctctcatacagggcatctgctcgaacatcaaaggacgcacaccggtaaaaagactagtcatatgctcgagcccggggaaaagccttacaaatgccccgaatgtgggaagagtttcagccggtctgataagctgaccgaacaccagagaactcataccggtaaaaaaactagtgctagcctcgagcccggggaaaagccctacaagtgccctgagtgtgggaagtccttttcttcaagacgcacgtgccgcgctcaccagcggacacataccggtaagaaaactagtttaattaactcgagcccggggagaaaccatacaaatgtcccgaatgtggcaagtccttctcacagaactctactttgaccgagcatcagagaactcacaccggtaagaagactagtccgcggctcgagcccggggaaaagccttataagtgccccgaatgcggaaagagcttctcaaggaatgatgcacttaccgagcatcaaaggactcataccggtaaaaaaactagtgcatgcttcgaactcgagcccggggaaaagccctataagtgtcccgaatgcggcaagagttttagtactactggcgcactcacagaacaccagcgcactcacaccggtaagaaaactagtgaaagtcctctccactgactgtagcctccaattcactggagatctgacacaagcttggcgtaatcatggtcatagctgtttcctgtgtgaaattgttatccgctcacaattccacacaacatacgagccggaagcataaagtgtaaagcctggggtgcctaatgagtgagctaactcacattaattgcgttgcgctcactgcccgctttccagtcgggaaacctgtcgtgccagctgcattaatgaatcggccaacgcgcggggagaggcggtttgcgtattgggcgctcttccgcttcctcgctcactgactcgctgcgctcggtcgttcggctgcggcgagcggtatcagctcactcaaaggcggtaatacggttatccacagaatcaggggataacgcaggaaagaacatgtgagcaaaaggccagcaaaaggccaggaaccgtaaaaaggccgcgttgctggcgtttttccataggctccgcccccctgacgagcatcacaaaaatcgacgctcaagtcagaggtggcgaaacccgacaggactataaagataccaggcgtttccccctggaagctccctcgtgcgctctcctgttccgaccctgccgcttaccggatacctgtccgcctttctcccttcgggaagcgtggcgctttctcatagctcacgctgtaggtatctcagttcggtgtaggtcgttcgctccaagctgggctgtgtgcacgaaccccccgttcagcccgaccgctgcgccttatccggtaactatcgtcttgagtccaacccggtaagacacgacttatcgccactggcagcagccactggtaacaggattagcagagcgaggtatgtaggcggtgctacagagttcttgaagtggtggcctaactacggctacactagaagaacagtatttggtatctgcgctctgctgaagccagttaccttcggaaaaagagttggtagctcttgatccggcaaacaaaccaccgctggtagcggtggtttttttgtttgcaagcagcagattacgcgcagaaaaaaaggatctcaagaagatcctttgatcttttctacggggtctgacgctcagtggaacgaaaactcacgttaagggattttggtcatgagattatcaaaaaggatcttcacctagatccttttaaattaaaaatgaagttttaaatcaatctaaagtatatatgagtaaacttggtctgacagttaccaatgcttaatcagtgaggcacctatctcagcgatctgtctatttcgttcatccatagttgcctgactccccgtcgtgtagataactacgatacgggagggcttaccatctggccccagtgctgcaatgataccgcgagacccacgctcaccggctccagatttatcagcaataaaccagccagccggaagggccgagcgcagaagtggtcctgcaactttatccgcctccatccagtctattaattgttgccgggaagctagagtaagtagttcgccagttaatagtttgcgcaacgttgttgccattgctacaggcatcgtggtgtcacgctcgtcgtttggtatggcttcattcagctccggttcccaacgatcaaggcgagttacatgatcccccatgttgtgcaaaaaagcggttagctccttcggtcctccgatcgttgtcagaagtaagttggccgcagtgttatcactcatggttatggcagcactgcataattctcttactgtcatgccatccgtaagatgcttttctgtgactggtgagtactcaaccaagtcattctgagaatagtgtatgcggcgaccgagttgctcttgcccggcgtcaatacgggataataccgcgccacatagcagaactttaaaagtgctcatcattggaaaacgttcttcggggcgaaaactctcaaggatcttaccgctgttgagatccagttcgatgtaacccactcgtgcacccaactgatcttcagcatcttttactttcaccagcgtttctgggtgagcaaaaacaggaaggcaaaatgccgcaaaaaagggaataagggcgacacggaaatgttgaatactcatactcttcctttttcaatattattgaagcatttatcagggttattgtctcatgagcggatacatatttgaatgtatttagaaaaataaacaaataggggttccgcgcacatttccccgaaaagtgccacctgacgtctaagaaaccattattatcatgacattaacctataaaaataggcgtatcacgaggccctttcgtc

SEQ ID NO: 266 - DNA, 4376 bp, Artificial Sequence
  synthetic contruct
tcgcgcgtttcggtgatgacggtgaaaacctctgacacatgcagctcccggagacggtcacagcttgtctgtaagcggatgccgggagcagacaagcccgtcagggcgcgtcagcgggtgttggcgggtgtcggggctggcttaactatgcggcatcagagcagattgtactgagagtgcaccatatgcggtgtgaaataccgcacagatgcgtaaggagaaaataccgcatcaggcgccattcgccattcaggctgcgcaactgttgggaagggcgatcggtgcgggcctcttcgctattacgccagctggcgaaagggggatgtgctgcaaggcgattaagttgggtaacgccagggttttcccagtcacgacgttgtaaaacgacggccagtgaattcgagctcggtaccgtatacctcgagcccggggagaagccatacaaatgccctgagtgtggaaagtcatttagccagcgagctaatctgcgggcccaccagcggacccacaccggtaagaagactagtcttaagctcgagcccggggagaagccatacaaatgtccagaatgtggaaagtccttctctgatagtggcaacctcagagtgcatcagcgaacacataccggtaagaagactagtggcgcgccctcgagcccggggaaaagccatataagtgccctgagtgtggaaagagcttcagtaggaaggataaccttaaaaaccaccaaagaacccacaccggtaagaagactagtcctaggctcgagcccggggaaaagccatataaatgtcccgagtgcggcaaatccttctctaccactggcaacctcacagtgcatcaacggactcacaccggtaaaaagactagtcctcagcctcgagcccggggaaaagccctataaatgtcccgagtgcggaaagtctttttccagccctgccgacctgacacgccaccaacgaacgcacaccggtaagaagactagtatgcatctcgagcccggggaaaagccgtacaaatgtccagagtgtggaaaatccttttctgataaaaaggacctgacacggcatcagcgaacccacaccggtaaaaagactagttgtacactcgagcccggggagaaaccttataaatgcccagaatgcggtaaaagtttcagcaggacggataccttgcgggatcatcagagaacccacaccggtaaaaaaactagtgaattcctcgagcccggggaaaaaccatacaagtgccccgagtgtggcaagagctttagtacccacctcgacctgattagacaccagcgcacccacaccggtaagaaaactagtcaattgctcgagcccggggaaaagccctataagtgcccagagtgcgggaaatcattctcacagctggcacatcttagagcccaccagcggacccacaccggtaagaagactagtccatggctcgagcccggggagaaaccctataagtgccctgaatgcggcaagtctttcagtgagcggtcacatctccgagagcaccagcgaacgcacaccggtaaaaagactagtcatatgctcgagcccggggaaaaaccctacaagtgccctgagtgtggaaagtcatttagtcgctccgaccacctgaccaaccatcagcggactcacaccggtaagaaaactagtgctagcctcgagcccggggagaaaccttacaagtgccccgagtgcggcaagagtttcagccacaggaccaccctgacaaaccaccagaggacccacaccggtaaaaagactagtttaattaactcgagcccggggagaaaccttataagtgtcctgagtgcggcaaaagtttctctcaaaagtcctcccttattgcccatcaaaggacccataccggtaagaagactagtgtttaaacctcgagcccggggagaagccctataaatgtcccgagtgcggaaagtccttctcacggcgcgatgaattgaacgtccatcagagaacacacaccggtaaaaaaactagtccgcggctcgagcccggggaaaaaccttataagtgtcccgagtgcggcaagagtttcagtcacaaaaacgcacttcagaatcatcagaggacacataccggtaagaaaactagtgcatgcaagcttggcgtaatcatggtcatagctgtttcctgtgtgaaattgttatccgctcacaattccacacaacatacgagccggaagcataaagtgtaaagcctggggtgcctaatgagtgagctaactcacattaattgcgttgcgctcactgcccgctttccagtcgggaaacctgtcgtgccagctgcattaatgaatcggccaacgcgcggggagaggcggtttgcgtattgggcgctcttccgcttcctcgctcactgactcgctgcgctcggtcgttcggctgcggcgagcggtatcagctcactcaaaggcggtaatacggttatccacagaatcaggggataacgcaggaaagaacatgtgagcaaaaggccagcaaaaggccaggaaccgtaaaaaggccgcgttgctggcgtttttccataggctccgcccccctgacgagcatcacaaaaatcgacgctcaagtcagaggtggcgaaacccgacaggactataaagataccaggcgtttccccctggaagctccctcgtgcgctctcctgttccgaccctgccgcttaccggatacctgtccgcctttctcccttcgggaagcgtggcgctttctcatagctcacgctgtaggtatctcagttcggtgtaggtcgttcgctccaagctgggctgtgtgcacgaaccccccgttcagcccgaccgctgcgccttatccggtaactatcgtcttgagtccaacccggtaagacacgacttatcgccactggcagcagccactggtaacaggattagcagagcgaggtatgtaggcggtgctacagagttcttgaagtggtggcctaactacggctacactagaagaacagtatttggtatctgcgctctgctgaagccagttaccttcggaaaaagagttggtagctcttgatccggcaaacaaaccaccgctggtagcggtggtttttttgtttgcaagcagcagattacgcgcagaaaaaaaggatctcaagaagatcctttgatcttttctacggggtctgacgctcagtggaacgaaaactcacgttaagggattttggtcatgagattatcaaaaaggatcttcacctagatccttttaaattaaaaatgaagttttaaatcaatctaaagtatatatgagtaaacttggtctgacagttaccaatgcttaatcagtgaggcacctatctcagcgatctgtctatttcgttcatccatagttgcctgactccccgtcgtgtagataactacgatacgggagggcttaccatctggccccagtgctgcaatgataccgcgagacccacgctcaccggctccagatttatcagcaataaaccagccagccggaagggccgagcgcagaagtggtcctgcaactttatccgcctccatccagtctattaattgttgccgggaagctagagtaagtagttcgccagttaatagtttgcgcaacgttgttgccattgctacaggcatcgtggtgtcacgctcgtcgtttggtatggcttcattcagctccggttcccaacgatcaaggcgagttacatgatcccccatgttgtgcaaaaaagcggttagctccttcggtcctccgatcgttgtcagaagtaagttggccgcagtgttatcactcatggttatggcagcactgcataattctcttactgtcatgccatccgtaagatgcttttctgtgactggtgagtactcaaccaagtcattctgagaatagtgtatgcggcgaccgagttgctcttgcccggcgtcaatacgggataataccgcgccacatagcagaactttaaaagtgctcatcattggaaaacgttcttcggggcgaaaactctcaaggatcttaccgctgttgagatccagttcgatgtaacccactcgtgcacccaactgatcttcagcatcttttactttcaccagcgtttctgggtgagcaaaaacaggaaggcaaaatgccgcaaaaaagggaataagggcgacacggaaatgttgaatactcatactcttcctttttcaatattattgaagcatttatcagggttattgtctcatgagcggatacatatttgaatgtatttagaaaaataaacaaataggggttccgcgcacatttccccgaaaagtgccacctgacgtctaagaaaccattattatcatgacattaacctataaaaataggcgtatcacgaggccctttcgtc

SEQ ID NO: 267 - DNA, 57 bp, Artificial Sequence
  Synthetic construct
tcgacaggcccaggcggccctcgaggatatcatgatgactagtggccaggccggccc

SEQ ID NO: 268 - DNA, 57 bp, Artificial Sequence
  Synthetic construct
aattgggccggcctggccactagtcatcatgatatcctcgagggccgcctgggcctg

SEQ ID NO: 269 - DNA, 6699 bp, Artificial Sequence
  Synthetic construct
gcttgcatgcaacttcttttctttttttttcttttctctctcccccgttgttgtctcaccatatccgcaatgacaaaaaaaatgatggaagacactaaaggaaaaaattaacgacaaagacagcaccaacagatgtcgttgttccagagctgatgaggggtatcttcgaacacacgaaactttttccttccttcattcacgcacactactctctaatgagcaacggtatacggccttccttccagttacttgaatttgaaataaaaaaagtttgccgctttgctatcaagtataaatagacctgcaattattaatcttttgtttcctcgtcattgttctcgttccctttcttccttgtttctttttctgcacaatatttcaagctataccaagcatacaatcaactccaagctttgcaaagatggataaagcggaattaattcccgagcctccaaaaaagaagagaaaggtcgaattgggtaccgccgccaattttaatcaaagtgggaatattgctgatagctcattgtccttcactttcactaacagtagcaacggtccgaacctcataacaactcaaacaaattctcaagcgctttcacaaccaattgcctcctctaacgttcatgataacttcatgaataatgaaatcacggctagtaaaattgatgatggtaataattcaaaaccactgtcacctggttggacggaccaaactgcgtataacgcgtttggaatcactacagggatgtttaataccactacaatggatgatgtatataactatctattcgatgatgaagataccccaccaaacccaaaaaaagagatctctcgacaggcccaggcggccctcgaggatatcatgatgactagtggccaggccggcccaattccagatctatgaatcgtagatactgaaaaaccccgcaagttcacttcaactgtgcatcgtgcaccatctcaatttctttcatttatacatcgttttgccttcttttatgtaactatactcctctaagtttcaatcttggccatgtaacctctgatctatagaattttttaaatgactagaattaatgcccatcttttttttggacctaaattcttcatgaaaatatattacgagggcttattcagaagctttggacttcttcgccagaggtttggtcaagtctccaatcaaggttgtcggcttgtctaccttgccagaaatttacgaaaagatggaaaagggtcaaatcgttggtagatacgttgttgacacttctaaataagcgaatttcttatgatttatgatttttattattaaataagttataaaaaaaataagtgtatacaaattttaaagtgactcttaggttttaaaacgaaaattcttattcttgagtaactctttcctgtaggtcaggttgctttctcaggtatagcatgaggtcgctcttattgaccacacctctaccggcatgccggtcgaaattcccctaccctatgaacatattccattttgtaatttcgtgtcgtttctattatgaatttcatttataaagtttatgtacaaatatcataaaaaaagagaatctttttaagcaaggattttcttaacttcttcggcgacagcatcaccgacttcggtggtactgttggaaccacctaaatcaccagttctgatacctgcatccaaaacctttttaactgcatcttcaatggccttaccttcttcaggcaagttcaatgacaatttcaacatcattgcagcagacaagatagtggcgatagggtcaaccttattctttggcaaatctggagcagaaccgtggcatggttcgtacaaaccaaatgcggtgttcttgtctggcaaagaggccaaggacgcagatggcaacaaacccaaggaacctgggataacggaggcttcatcggagatgatatcaccaaacatgttgctggtgattataataccatttaggtgggttgggttcttaactaggatcatggcggcagaatcaatcaattgatgttgaaccttcaatgtaggaaattcgttcttgatggtttcctccacagtttttctccataatcttgaagaggccaaaacattagctttatccaaggaccaaataggcaatggtggctcatgttgtagggccatgaaagcggccattcttgtgattctttgcacttctggaacggtgtattgttcactatcccaagcgacaccatcaccatcgtcttcctttctcttaccaaagtaaatacctcccactaattctctgacaacaacgaagtcagtacctttagcaaattgtggcttgattggagataagtctaaaagagagtcggatgcaaagttacatggtcttaagttggcgtacaattgaagttctttacggatttttagtaaaccttgttcaggtctaacactacctgtaccccatttaggaccacccacagcacctaacaaaacggcatcaaccttcttggaggcttccagcgcctcatctggaagtgggacacctgtagcatcgatagcagcaccaccaattaaatgattttcgaaatcgaacttgacattggaacgaacatcagaaatagctttaagaaccttaatggcttcggctgtgatttcttgaccaacgtggtcacctggcaaaacgacgatcttcttaggggcagacattagaatggtatatccttgaaatatatatatatattgctgaaatgtaaaaggtaagaaaagttagaaagtaagacgattgctaaccacctattggaaaaaacaataggtccttaaataatattgtcaacttcaagtattgtgatgcaagcatttagtcatgaacgcttctctattctatatgaaaagccggttccggcctctcacctttcctttttctcccaatttttcagttgaaaaaggtatatgcgtcaggcgacctctgaaattaacaaaaaatttccagtcatcgaatttgattctgtgcgatagcgcccctgtgtgttctcgttatgttgaggaaaaaaataatggttgctaagagattcgaactcttgcatcttacgatacctgagtattcccacagttggggatctcgactctagctagaggatcaattcgtaatcatggtcatagctgtttcctgtgtgaaattgttatccgctcacaattccacacaacatacgagccggaagcataaagtgtaaagcctggggtgcctaatgagtgaggtaactcacattaattgcgttgcgctcactgcccgctttccagtcgggaaacctgtcgtgccagctggattaatgaatcggccaacgcgcggggagaggcggtttgcgtattgggcgctcttccgcttcctcgctcactgactcgctgcgctcggtcgttcggctgcggcgagcggtatcagctcactcaaaggcggtaatacggttatccacagaatcaggggataacgcaggaaagaacatgtgagcaaaaggccagcaaaaggccaggaaccgtaaaaaggccgcgttgctggcgtttttccataggctccgcccccctgacgagcatcacaaaaatcgacgctcaagtcagaggtggcgaaacccgacaggactataaagataccaggcgtttccccctggaagctccctcgtgcgctctcctgttccgaccctgccgcttaccggatacctgtccgcctttctcccttcgggaagcgtggcgctttctcatagctcacgctgtaggtatctcagttcggtgtaggtcgttcgctccaagctgggctgtgtgcacgaaccccccgttcagcccgaccgctgcgccttatccggtaactatcgtcttgagtccaacccggtaagacacgacttatcgccactggcagcagccactggtaacaggattagcagagcgaggtatgtaggcggtgctacagagttcttgaagtggtggcctaactacggctacactagaaggacagtatttggtatctgcgctctgctgaagccagttaccttcggaaaaagagttggtagctcttgatccggcaaacaaaccaccgctggtagcggtggtttttttgtttgcaagcagcagattacgcgcagaaaaaaaggatctcaagaagatcctttgatcttttctacggggtctgacgctcagtggaacgaaaactcacgttaagggattttggtcatgagattatcaaaaaggatcttcacctagatccttttaaattaaaaatgaagttttaaatcaatctaaagtatatatgagtaaacttggtctgacagttaccaatgcttaatcagtgaggcacctatctcagcgatctgtctatttcgttcatccatagttgcctgactccccgtcgtgtagataactacgatacgggagggcttaccatctggccccagtgctgcaatgataccgcgagacccacgctcaccggctccagatttatcagcaataaaccagccagccggaagggccgagcgcagaagtggtcctgcaactttatccgcctccatccagtctattaattgttgccgggaagctagagtaagtagttcgccagttaatagtttgcgcaacgttgttgccattgctacaggcatcgtggtgtcacgctcgtcgtttggtatggcttcattcagctccggttcccaacgatcaaggcgagttacatgatcccccatgttgtgcaaaaaagcggttagctccttcggtcctccgatcgttgtcagaagtaagttggccgcagtgttatcactcatggttatggcagcactgcataattctcttactgtcatgccatccgtaagatgcttttctgtgactggtgagtactcaaccaagtcattctgagaatagtgtatgcggcgaccgagttgctcttgcccggcgtcaatacgggataataccgcgccacatagcagaactttaaaagtgctcatcattggaaaacgttcttcggggcgaaaactctcaaggatcttaccgctgttgagatccagttcgatgtaacccactcgtgcacccaactgatcttcagcatcttttactttcaccagcgtttctgggtgagcaaaaacaggaaggcaaaatgccgcaaaaaagggaataagggcgacacggaaatgttgaatactcatactcttcctttttcaatattattgaagcatttatcagggttattgtctcatgagcggatacatatttgaatgtatttagaaaaataaacaaataggggttccgcgcacatttccccgaaaagtgccacctgacgtctaagaaaccattattatcatgacattaacctataaaaataggcgtatcacgaggccctttcgtctcgcgcgtttcggtgatgacggtgaaaacctctgacacatgcagctcccggagacggtcacagcttgtctgtaagcggatgccgggagcagacaagcccgtcagggcgcgtcagcgggtgttggcgggtgtcggggctggcttaactatgcggcatcagagcagattgtactgagagtgcaccataacgcatttaagcataaacacgcactatgccgttcttctcatgtatatatatatacaggcaacacgcagatataggtgcgacgtgaacagtgagctgtatgtgcgcagctcgcgttgcattttcggaagcgctcgttttcggaaacgctttgaagttcctattccgaagttcctattctctagctagaaagtataggaacttcagagcgcttttgaaaaccaaaagcgctctgaagacgcactttcaaaaaaccaaaaacgcaccggactgtaacgagctactaaaatattgcgaataccgcttccacaaacattgctcaaaagtatctctttgctatatatctctgtgctatatccctatataacctacccatccacctttcgctccttgaacttgcatctaaactcgacctctacattttttatgtttatctctagtattactctttagacaaaaaaattgtagtaagaactattcatagagtgaatcgaaaacaatacgaaaatgtaaacatttcctatacgtagtatatagagacaaaatagaagaaaccgttcataattttctgaccaatgaagaatcatcaacgctatcactttctgttcacaaagtatgcgcaatccacatcggtatagaatataatcggggatgcctttatcttgaaaaaatgcacccgcagcttcgctagtaatcagtaaacgcgggaagtggagtcaggctttttttatggaagagaaaatagacaccaaagtagccttcttctaaccttaacggacctacagtgcaaaaagttatcaagagactgcattatagagcgcacaaaggagaaaaaaagtaatctaagatgctttgttagaaaaatagcgctctcgggatgcatttttgtagaacaaaaaagaagtatagattctttgttggtaaaatagcgctctcgcgttgcatttctgttctgtaaaaatgcagctcagattctttgtttgaaaaattagcgctctcgcgttgcatttttgttttacaaaaatgaagcacagattcttcgttggtaaaatagcgctttcgcgttgcatttctgttctgtaaaaatgcagctcagattctttgtttgaaaaattagcgctctcgcgttgcatttttgttctacaaaatgaagcacagatgcttcgtt

SEQ ID NO: 270 - DNA, 6481 bp, Artificial Sequence
  Synthetic construct
tcgcgcgtttcggtgatgacggtgaaaacctctgacacatgcagctcccggagacggtcacagcttgtctgtaagcggatgccgggagcagacaagcccgtcagggcgcgtcagcgggtgttggcgggtgtcggggctggcttaactatgcggcatcagagcagattgtactgagagtgcaccatatcgactacgtcgtaaggccgtttctgacagagtaaaattcttgagggaactttcaccattatgggaaatggttcaagaaggtattgacttaaactccatcaaatggtcaggtcattgagtgttttttatttgttgtatttttttttttttagagaaaatcctccaatatcaaattaggaatcgtagtttcatgattttctgttacacctaactttttgtgtggtgccctcctccttgtcaatattaatgttaaagtgcaattctttttccttatcacgttgagccattagtatcaatttgcttacctgtattcctttactatcctcctttttctccttcttgataaatgtatgtagattgcgtatatagtttcgtctaccctatgaacatattccattttgtaatttcgtgtcgtttctattatgaatttcatttataaagtttatgtacaaatatcataaaaaaagagaatctttttaagcaaggattttcttaacttcttcggcgacagcatcaccgacttcggtggtactgttggaaccacctaaatcaccagttctgatacctgcatccaaaacctttttaactgcatcttcaatggccttaccttcttcaggcaagttcaatgacaatttcaacatcattgcagcagacaagatagtggcgatagggtcaaccttattctttggcaaatctggagcagaaccgtggcatggttcgtacaaaccaaatgcggtgttcttgtctggcaaagaggccaaggacgcagatggcaacaaacccaaggaacctgggataacggaggcttcatcggagatgatatcaccaaacatgttgctggtgattataataccatttaggtgggttgggttcttaactaggatcatggcggcagaatcaatcaattgatgttgaaccttcaatgtagggaattcgttcttgatggtttcctccacagtttttctccataatcttgaagaggccaaaacattagctttatccaaggaccaaataggcaatggtggctcatgttgtagggccatgaaagcggccattcttgtgattctttgcacttctggaacggtgtattgttcactatcccaagcgacaccatcaccatcgtcttcctttctcttaccaaagtaaatacctcccactaattctctgacaacaacgaagtcagtacctttagcaaattgtggcttgattggagataagtctaaaagagagtcggatgcaaagttacatggtcttaagttggcgtacaattgaagttctttacggatttttagtaaaccttgttcaggtctaacactaccggtaccccatttaggaccacccacagcacctaacaaaacggcatcaaccttcttggaggcttccagcgcctcatctggaagtgggacacctgtagcatcgatagcagcaccaccaattaaatgattttcgaaatcgaacttgacattggaacgaacatcagaaatagctttaagaaccttaatggcttcggctgtgatttcttgaccaacgtggtcacctggcaaaacgacgatcttcttaggggcagacataggggcagacattagaatggtatatccttgaaatatatatatatattgctgaaatgtaaaaggtaagaaaagttagaaagtaagacgattgctaaccacctattggaaaaaacaataggtccttaaataatattgtcaacttcaagtattgtgatgcaagcatttagtcatgaacgcttctctattctatatgaaaagccggttccggcctctcacctttcctttttctcccaatttttcagttgaaaaaggtatatgcgtcaggcgacctctgaaattaacaaaaaatttccagtcatcgaatttgattctgtgcgatagcgcccctgtgtgttctcgttatgttgaggaaaaaaataatggttgctaagagattcgaactcttgcatcttacgatacctgagtattcccacagttaactgcggtcaagatatttcttgaatcaggcgccgcatgccggtagaggtgtggtcaataagagcgacctcatgctatacctgagaaagcaacctgacctacaggaaagagttactcaagaataagaattttcgttttaaaacctaagagtcactttaaaatttgtatacacttattttttttataacttatttaataataaaaatcataaatcataagaaattcgcttatttagaagtgtcaacaacgtatctaccaacgatttgacccttttccatcttttcgtaaatttctggcaaggtagacaagccgacaaccttgattggagacttgaccaaacctctggcgaagaagtccaaagcttctgaataagccctcgtaatatattttcatgaagaatttaggtccaaaaaaaagatgggcattaattctagtcatttaaaaaattctatagatcagaggttacatggccaagattgaaacttagaggagtatagttacataaaagaaggcaaaacgatgtataaatgaaagaaattgagatggtgcacgatgcacagttgaagtgaacttgcggggtttttcagtatctacgattcatagatctggaattgggccggcctggccactagtcatcatgatatcctcgagggccgcctgggcctgtcgagagatctctttttttgggtttggtggggtatcttcatcatcgaatagatagttatatacatcatccattgtagtggtattaaacatccctgtagtgattccaaacgcgttatacgcagtttggtccgtccaaccaggtgacagtggttttgaattattaccatcatcaattttactagccgtgatttcattattcatgaagttatcatgaacgttagaggaggcaattggttgtgaaagcgcttgagaatttgtttgagttgttatgaggttcggaccgttgctactgttagtgaaagtgaaggacaatgagctatcagcaatattcccactttgattaaaattggcggcggtacccaattcgacctttctcttcttttttggaggctcgggaattaattccgctttatccatctttgcaaagcttggagttgattgtatgcttggtatagcttgaaatattgtgcagaaaaagaaacaaggaagaaagggaacgagaacaatgacgaggaaacaaaagattaataattgcaggtctatttatacttgatagcaaagcggcaaactttttttatttcaaattcaagtaactggaaggaaggccgtataccgttgctcattagagagtagtgtgcgtgaatgaaggaaggaaaaagtttcgtgtgttcgaagatacccctcatcagctctggaacaacgacatctgttggtgctgtctttgtcgttaattttttcctttagtgtcttccatcattttttttgtcattgcggatatggtgagacaacaacgggggagagagaaaagaaaaaaaaagaaaagaagttgcatgcattcatgcgggcccggtacccagcttttgttccctttagtgagggttaattccgagcttggcgtaatcatggtcatagctgtttcctgtgtgaaattgttatccgctcacaattccacacaacataggagccggaagcataaagtgtaaagcctggggtgcctaatgagtgaggtaactcacattaattgcgttgcgctcactgcccgctttccagtcgggaaacctgtcgtgccagctgcattaatgaatcggccaacgcgcggggagaggcggtttgcgtattgggcgctcttccgcttcctcgctcactgactcgctgcgctcggtcgttcggctgcggcgagcggtatcagctcactcaaaggcggtaatacggttatccacagaatcaggggataacgcaggaaagaacatgtgagcaaaaggccagcaaaaggccaggaaccgtaaaaaggccgcgttgctggcgtttttccataggctcggcccccctgacgagcatcacaaaaatcgacgctcaagtcagaggtggcgaaacccgacaggactataaagataccaggcgttcccccctggaagctccctcgtgcgctctcctgttccgaccctgccgcttaccggatacctgtccgcctttctcccttcgggaagcgtggcgctttctcaatgctcacgctgtaggtatctcagttcggtgtaggtcgttcgctccaagctgggctgtgtgcacgaaccccccgttcagcccgaccgctgcgccttatccggtaactatcgtcttgagtccaacccggtaagacacgacttatcgccactggcagcagccactggtaacaggattagcagagcgaggtatgtaggcggtgctacagagttcttgaagtggtggcctaactacggctacactagaaggacagtatttggtatctgcgctctgctgaagccagttaccttcggaaaaagagttggtagctcttgatccggcaaacaaaccaccgctggtagcggtggtttttttgtttgcaagcagcagattacgcgcagaaaaaaaggatctcaagaagatcctttgatcttttctacggggtctgacgctcagtggaacgaaaactcacgttaagggattttggtcatgagattatcaaaaaggatcttcacctagatccttttaaattaaaaatgaagttttaaatcaatctaaagtatatatgagtaaacttggtctgacagttaccaatgcttaatcagtgaggcacctatctcagcgatctgtctatttcgttcatccatagttgcctgactgcccgtcgtgtagataactacgatacgggagggcttaccatctggccccagtgctgcaatgataccgcgagacccacgctcaccggctccagatttatcagcaataaaccagccagccggaagggccgagcgcagaagtggtcctgcaactttatccgcctccatccagtctattaattgttgccgggaagctagagtaagtagttcgccagttaatagtttgcgcaacgttgttgccattgctacaggcatcgtggtgtcacgctcgtcgtttggtatggcttcattcagctccggttcccaacgatcaaggcgagttacatgatcccccatgttgtgaaaaaaagcggttagctccttcggtcctccgatcgttgtcagaagtaagttggccgcagtgttatcactcatggttatggcagcactgcataattctcttactgtcatgccatccgtaagatgcttttctgtgactggtgagtactcaaccaagtcattctgagaatagtgtatgcggcgaccgagttgctcttgcccggcgtcaatacgggataataccgcgccacatagcagaactttaaaagtgctcatcattggaaaacgttcttcggggcgaaaactctcaaggatcttaccgctgttgagatccagttcgatgtaacccactcgtgcacccaactgatcttcagcatcttttactttcaccagcgtttctgggtgagcaaaaacaggaaggcaaaatgccgcaaaaaagggaataagggcgacacggaaatgttgaatactcatactcttcctttttcaatattattgaagcatttatcagggttattgtctcatgagcggatacatatttgaatgtatttagaaaaataaacaaataggggttccgcgcacatttccccgaaaagtgccacctgggtccttttcatcacgtgctataaaaataattataatttaaattttttaatataaatatataaattaaaaatagaaagtaaaaaaagaaattaaagaaaaaatagtttttgttttccgaagatgtaaaagactctagggggatcgccaacaaatactaccttttatcttgctcttcctgctctcaggtattaatgccgaattgtttcatcttgtctgtgtagaagaccacacacgaaaatcctgtgattttacattttacttatcgttaatcgaatgtatatctatttaatctgcttttcttgtctaataaatatatatgtaaagtacgctttttgttgaaattttttaaacctttgtttatttttttttcttcattccgtaactcttctaccttctttatttactttctaaaatccaaatacaaaacataaaaataaataaacacagagtaaattcccaaattattccatcattaaaagatacgaggcgcgtgtaagttacaggcaagcgatccgtcctaagaaaccattattatcatgacattaacctataaaaataggcgtatcacgaggccctttcgtc

SEQ ID NO: 271 - DNA, 6018 bp, Artificial Sequence
  Synthetic construct
tcgcgcgtttcggtgatgacggtgaaaacctctgacacatgcagctcccggagacggtcacagcttgtctgtaagcggatgccgggagcagacaagcccgtcagggcgcgtcagcgggtgttggcgggtgtcggggctggcttaactatgcggcatcagagcagattgtactgagagtgcaccatatcgactacgtcgtaaggccgtttctgacagagtaaaattcttgagggaactttcaccattatgggaaatggttcaagaaggtattgacttaaactccatcaaatggtcaggtcattgagtgttttttatttgttgtatttttttttttttagagaaaatcctccaatatcaaattaggaatcgtagtttcatgattttctgttacacctaactttttgtgtggtgccctcctccttgtcaatattaatgttaaagtgcaattctttttccttatcacgttgagccattagtatcaatttgcttacctgtattcctttactatcctcctttttctccttcttgataaatgtatgtagattgcgtatatagtttcgtctaccctatgaacatattccattttgtaatttcgtgtcgtttctattatgaatttcatttataaagtttatgtacaaatatcataaaaaaagagaatctttttaagcaaggattttcttaacttcttcggcgacagcatcaccgacttcggtggtactgttggaaccacctaaatcaccagttctgatacctgcatccaaaacctttttaactgcatcttcaatggccttaccttcttcaggcaagttcaatgacaatttcaacatcattgcagcagacaagatagtggcgatagggtcaaccttattctttggcaaatctggagcagaaccgtggcatggttcgtacaaaccaaatgcggtgttcttgtctggcaaagaggccaaggacgcagatggcaacaaacccaaggaacctgggataacggaggcttcatcggagatgatatcaccaaacatgttgctggtgattataataccatttaggtgggttgggttcttaactaggatcatggcggcagaatcaatcaattgatgttgaaccttcaatgtagggaattcgttcttgatggtttcctccacagtttttctccataatcttgaagaggccaaaacattagctttatccaaggaccaaataggcaatggtggctcatgttgtagggccatgaaagcggccattcttgtgattctttgcacttctggaacggtgtattgttcactatcccaagcgacaccatcaccatcgtcttcctttctcttaccaaagtaaatacctcccactaattctctgacaacaacgaagtcagtacctttagcaaattgtggcttgattggagataagtctaaaagagagtcggatgcaaagttacatggtcttaagttggcgtacaattgaagttctttacggatttttagtaaaccttgttcaggtctaacactaccggtaccccatttaggaccacccacagcacctaacaaaacggcatcaaccttcttggaggcttccagcgcctcatctggaagtgggacacctgtagcatcgatagcagcaccaccaattaaatgattttcgaaatcgaacttgacattggaacgaacatcagaaatagctttaagaaccttaatggcttcggctgtgatttcttgaccaacgtggtcacctggcaaaacgacgatcttcttaggggcagacataggggcagacattagaatggtatatccttgaaatatatatatatattgctgaaatgtaaaaggtaagaaaagttagaaagtaagacgattgctaaccacctattggaaaaaacaataggtccttaaataatattgtcaacttcaagtattgtgatgcaagcatttagtcatgaacgcttctctattctatatgaaaagccggttccggcctctcacctttcctttttctcccaatttttcagttgaaaaaggtatatgcgtcaggcgacctctgaaattaacaaaaaatttccagtcatcgaatttgattctgtgcgatagcgcccctgtgtgttctcgttatgttgaggaaaaaaataatggttgctaagagattcgaactcttgcatcttacgatacctgagtattcccacagttaactgcggtcaagatatttcttgaatcaggcgccttagaccgctcggccaaacaaccaattacttgttgagaaatagagtataattatcctataaatataacgtttttgaacacacatgaacaaggaagtacaggacaattgattttgaagagaatgtggattttgatgtaattgttgggattccatttttaataaggcaataatattaggtatgtggatatactagaagttctcctcgagggtcgatatgcggtgtgaaataccgcacagatgcgtaaggagaaaataccgcatcaggaaattgtaaacgttaatattttgttaaaattcgcgttaaatttttgttaaatcagctcattttttaaccaataggccgaaatcggcaaaatcccttataaatcaaaagaatagaccgagatagggttgagtgttgttccagtttggaacaagagtccactattaaagaacgtggactccaacgtcaaagggcgaaaaaccgtctatcagggcgatggcccactacgtgaaccatcaccctaatcaagttttttggggtcgaggtgccgtaaagcactaaatcggaaccctaaagggagcccccgatttagagcttgacggggaaagccggcgaacgtggcgagaaaggaagggaagaaagcgaaaggagcgggcgctagggcgctggcaagtgtagcggtcacgctgcgcgtaaccaccacacccgccgcgcttaatgcgccgctacagggcgcgtcgcgccattcgccattcaggctgcgcaactgttgggaagggcgatcggtgcgggcctcttcgctattacgccagctggcgaaggggggatgtgctgcaaggcgattaagttgggtaacgccagggttttcccagtcacgacgttgtaaaacgacggccagtgaattgtaatacgactcactatagggcgaattggagctccaccgcggtggcggccgctctagaactagtggatcccccgggctgcaggaattcgatatcaagcttatcgataccgtcgacctcgagggggggcccggtacccagcttttgttccctttagtgagggttaattccgagcttggcgtaatcatggtcatagctgtttcctgtgtgaaattgttatccgctcacaattccacacaacataggagccggaagcataaagtgtaaagcctggggtgcctaatgagtgaggtaactcacattaattgcgttgcgctcactgcccgctttccagtcgggaaacctgtcgtgccagctgcattaatgaatcggccaacgcgcggggagaggcggtttgcgtattgggcgctcttccgcttcctcgctcactgactcgctgcgctcggtcgttcggctgcggcgagcggtatcagctcactcaaaggcggtaatacggttatccacagaatcaggggataacgcaggaaagaacatgtgagcaaaaggccagcaaaaggccaggaaccgtaaaaaggccgcgttgctggcgtttttccataggctcggcccccctgacgagcatcacaaaaatcgacgctcaagtcagaggtggcgaaacccgacaggactataaagataccaggcgttcccccctggaagctccctcgtgcgctctcctgttccgaccctgccgcttaccggatacctgtccgcctttctcccttcgggaagcgtggcgctttctcaatgctcacgctgtaggtatctcagttcggtgtaggtcgttcgctccaagctgggctgtgtgcacgaaccccccgttcagcccgaccgctgcgccttatccggtaactatcgtcttgagtccaacccggtaagacacgacttatcgccactggcagcagccactggtaacaggattagcagagcgaggtatgtaggcggtgctacagagttcttgaagtggtggcctaactacggctacactagaaggacagtatttggtatctgcgctctgctgaagccagttaccttcggaaaaagagttggtagctcttgatccggcaaacaaaccaccgctggtagcggtggtttttttgtttgcaagcagcagattacgcgcagaaaaaaaggatctcaagaagatcctttgatcttttctacggggtctgacgctcagtggaacgaaaactcacgttaagggattttggtcatgagattatcaaaaaggatcttcacctagatccttttaaattaaaaatgaagttttaaatcaatctaaagtatatatgagtaaacttggtctgacagttaccaatgcttaatcagtgaggcacctatctcagcgatctgtctatttcgttcatccatagttgcctgactgcccgtcgtgtagataactacgatacgggagggcttaccatctggccccagtgctgcaatgataccgcgagacccacgctcaccggctccagatttatcagcaataaaccagccagccggaagggccgagcgcagaagtggtcctgcaactttatccgcctccatccagtctattaattgttgccgggaagctagagtaagtagttcgccagttaatagtttgcgcaacgttgttgccattgctacaggcatcgtggtgtcacgctcgtcgtttggtatggcttcattcagctccggttcccaacgatcaaggcgagttacatgatcccccatgttgtgaaaaaaagcggttagctccttcggtcctccgatcgttgtcagaagtaagttggccgcagtgttatcactcatggttatggcagcactgcataattctcttactgtcatgccatccgtaagatgcttttctgtgactggtgagtactcaaccaagtcattctgagaatagtgtatgcggcgaccgagttgctcttgcccggcgtcaatacgggataataccgcgccacatagcagaactttaaaagtgctcatcattggaaaacgttcttcggggcgaaaactctcaaggatcttaccgctgttgagatccagttcgatgtaacccactcgtgcacccaactgatcttcagcatcttttactttcaccagcgtttctgggtgagcaaaaacaggaaggcaaaatgccgcaaaaaagggaataagggcgacacggaaatgttgaatactcatactcttcctttttcaatattattgaagcatttatcagggttattgtctcatgagcggatacatatttgaatgtatttagaaaaataaacaaataggggttccgcgcacatttccccgaaaagtgccacctgggtccttttcatcacgtgctataaaaataattataatttaaattttttaatataaatatataaattaaaaatagaaagtaaaaaaagaaattaaagaaaaaatagtttttgttttccgaagatgtaaaagactctagggggatcgccaacaaatactaccttttatcttgctcttcctgctctcaggtattaatgccgaattgtttcatcttgtctgtgtagaagaccacacacgaaaatcctgtgattttacattttacttatcgttaatcgaatgtatatctatttaatctgcttttcttgtctaataaatatatatgtaaagtacgctttttgttgaaattttttaaacctttgtttatttttttttcttcattccgtaactcttctaccttctttatttactttctaaaatccaaatacaaaacataaaaataaataaacacagagtaaattcccaaattattccatcattaaaagatacgaggcgcgtgtaagttacaggcaagcgatccgtcctaagaaaccattattatcatgacattaacctataaaaataggcgtatcacgaggccctttcgtc

SEQ ID NO: 272 - DNA, 23 bp, Artificial Sequence
  Synthetic construct
cgccgcatgcattcatgcaggcc

SEQ ID NO: 273 - DNA, 17 bp, Artificial Sequence
  Synthetic construct
tgcatgaatgcatgcgg

SEQ ID NO: 274 - DNA, 5021 bp, Artificial Sequence
  Synthetic construct
tcgcgcgtttcggtgatgacggtgaaaacctctgacacatgcagctcccggagacggtcacagcttgtctgtaagcggatgccgggagcagacaagcccgtcagggcgcgtcagcgggtgttggcgggtgtcggggctggcttaactatgcggcatcagagcagattgtactgagagtgcaccatatcgactacgtcgtaaggccgtttctgacagagtaaaattcttgagggaactttcaccattatgggaaatggttcaagaaggtattgacttaaactccatcaaatggtcaggtcattgagtgttttttatttgttgtatttttttttttttagagaaaatcctccaatatcaaattaggaatcgtagtttcatgattttctgttacacctaactttttgtgtggtgccctcctccttgtcaatattaatgttaaagtgcaattctttttccttatcacgttgagccattagtatcaatttgcttacctgtattcctttactatcctcctttttctccttcttgataaatgtatgtagattgcgtatatagtttcgtctaccctatgaacatattccattttgtaatttcgtgtcgtttctattatgaatttcatttataaagtttatgtacaaatatcataaaaaaagagaatctttttaagcaaggattttcttaacttcttcggcgacagcatcaccgacttcggtggtactgttggaaccacctaaatcaccagttctgatacctgcatccaaaacctttttaactgcatcttcaatggccttaccttcttcaggcaagttcaatgacaatttcaacatcattgcagcagacaagatagtggcgatagggtcaaccttattctttggcaaatctggagcagaaccgtggcatggttcgtacaaaccaaatgcggtgttcttgtctggcaaagaggccaaggacgcagatggcaacaaacccaaggaacctgggataacggaggcttcatcggagatgatatcaccaaacatgttgctggtgattataataccatttaggtgggttgggttcttaactaggatcatggcggcagaatcaatcaattgatgttgaaccttcaatgtagggaattcgttcttgatggtttcctccacagtttttctccataatcttgaagaggccaaaacattagctttatccaaggaccaaataggcaatggtggctcatgttgtagggccatgaaagcggccattcttgtgattctttgcacttctggaacggtgtattgttcactatcccaagcgacaccatcaccatcgtcttcctttctcttaccaaagtaaatacctcccactaattctctgacaacaacgaagtcagtacctttagcaaattgtggcttgattggagataagtctaaaagagagtcggatgcaaagttacatggtcttaagttggcgtacaattgaagttctttacggatttttagtaaaccttgttcaggtctaacactaccggtaccccatttaggaccacccacagcacctaacaaaacggcatcaaccttcttggaggcttccagcgcctcatctggaagtgggacacctgtagcatcgatagcagcaccaccaattaaatgattttcgaaatcgaacttgacattggaacgaacatcagaaatagctttaagaaccttaatggcttcggctgtgatttcttgaccaacgtggtcacctggcaaaacgacgatcttcttaggggcagacataggggcagacattagaatggtatatccttgaaatatatatatatattgctgaaatgtaaaaggtaagaaaagttagaaagtaagacgattgctaaccacctattggaaaaaacaataggtccttaaataatattgtcaacttcaagtattgtgatgcaagcatttagtcatgaacgcttctctattctatatgaaaagccggttccggcctctcacctttcctttttctcccaatttttcagttgaaaaaggtatatgcgtcaggcgacctctgaaattaacaaaaaatttccagtcatcgaatttgattctgtgcgatagcgcccctgtgtgttctcgttatgttgaggaaaaaaataatggttgctaagagattcgaactcttgcatcttacgatacctgagtattcccacagttaactgcggtcaagatatttcttgaatcaggcgccgcatgcattcatgcaggcccggtacccagcttttgttccctttagtgagggttaattccgagcttggcgtaatcatggtcatagctgtttcctgtgtgaaattgttatccgctcacaattccacacaacataggagccggaagcataaagtgtaaagcctggggtgcctaatgagtgaggtaactcacattaattgcgttgcgctcactgcccgctttccagtcgggaaacctgtcgtgccagctgcattaatgaatcggccaacgcgcggggagaggcggtttgcgtattgggcgctcttccgcttcctcgctcactgactcgctgcgctcggtcgttcggctgcggcgagcggtatcagctcactcaaaggcggtaatacggttatccacagaatcaggggataacgcaggaaagaacatgtgagcaaaaggccagcaaaaggccaggaaccgtaaaaaggccgcgttgctggcgtttttccataggctcggcccccctgacgagcatcacaaaaatcgacgctcaagtcagaggtggcgaaacccgacaggactataaagataccaggcgttcccccctggaagctccctcgtgcgctctcctgttccgaccctgccgcttaccggatacctgtccgcctttctcccttcgggaagcgtggcgctttctcaatgctcacgctgtaggtatctcagttcggtgtaggtcgttcgctccaagctgggctgtgtgcacgaaccccccgttcagcccgaccgctgcgccttatccggtaactatcgtcttgagtccaacccggtaagacacgacttatcgccactggcagcagccactggtaacaggattagcagagcgaggtatgtaggcggtgctacagagttcttgaagtggtggcctaactacggctacactagaaggacagtatttggtatctgcgctctgctgaagccagttaccttcggaaaaagagttggtagctcttgatccggcaaacaaaccaccgctggtagcggtggtttttttgtttgcaagcagcagattacgcgcagaaaaaaaggatctcaagaagatcctttgatcttttctacggggtctgacgctcagtggaacgaaaactcacgttaagggattttggtcatgagattatcaaaaaggatcttcacctagatccttttaaattaaaaatgaagttttaaatcaatctaaagtatatatgagtaaacttggtctgacagttaccaatgcttaatcagtgaggcacctatctcagcgatctgtctatttcgttcatccatagttgcctgactgcccgtcgtgtagataactacgatacgggagggcttaccatctggccccagtgctgcaatgataccgcgagacccacgctcaccggctccagatttatcagcaataaaccagccagccggaagggccgagcgcagaagtggtcctgcaactttatccgcctccatccagtctattaattgttgccgggaagctagagtaagtagttcgccagttaatagtttgcgcaacgttgttgccattgctacaggcatcgtggtgtcacgctcgtcgtttggtatggcttcattcagctccggttcccaacgatcaaggcgagttacatgatcccccatgttgtgaaaaaaagcggttagctccttcggtcctccgatcgttgtcagaagtaagttggccgcagtgttatcactcatggttatggcagcactgcataattctcttactgtcatgccatccgtaagatgcttttctgtgactggtgagtactcaaccaagtcattctgagaatagtgtatgcggcgaccgagttgctcttgcccggcgtcaatacgggataataccgcgccacatagcagaactttaaaagtgctcatcattggaaaacgttcttcggggcgaaaactctcaaggatcttaccgctgttgagatccagttcgatgtaacccactcgtgcacccaactgatcttcagcatcttttactttcaccagcgtttctgggtgagcaaaaacaggaaggcaaaatgccgcaaaaaagggaataagggcgacacggaaatgttgaatactcatactcttcctttttcaatattattgaagcatttatcagggttattgtctcatgagcggatacatatttgaatgtatttagaaaaataaacaaataggggttccgcgcacatttccccgaaaagtgccacctgggtccttttcatcacgtgctataaaaataattataatttaaattttttaatataaatatataaattaaaaatagaaagtaaaaaaagaaattaaagaaaaaatagtttttgttttccgaagatgtaaaagactctagggggatcgccaacaaatactaccttttatcttgctcttcctgctctcaggtattaatgccgaattgtttcatcttgtctgtgtagaagaccacacacgaaaatcctgtgattttacattttacttatcgttaatcgaatgtatatctatttaatctgcttttcttgtctaataaatatatatgtaaagtacgctttttgttgaaattttttaaacctttgtttatttttttttcttcattccgtaactcttctaccttctttatttactttctaaaatccaaatacaaaacataaaaataaataaacacagagtaaattcccaaattattccatcattaaaagatacgaggcgcgtgtaagttacaggcaagcgatccgtcctaagaaaccattattatcatgacattaacctataaaaataggcgtatcacgaggccctttcgtc

SEQ ID NO: 275 - DNA, 6408 bp, Artificial Sequence
  synthetic construct
tcgcgcgtttcggtgatgacggtgaaaacctctgacacatgcagctcccggagacggtcacagcttgtctgtaagcggatgccgggagcagacaagcccgtcagggcgcgtcagcgggtgttggcgggtgtcggggctggcttaactatgcggcatcagagcagattgtactgagagtgcaccatatcgactacgtcgtaaggccgtttctgacagagtaaaattcttgagggaactttcaccattatgggaaatggttcaagaaggtattgacttaaactccatcaaatggtcaggtcattgagtgttttttatttgttgtatttttttttttttagagaaaatcctccaatatcaaattaggaatcgtagtttcatgattttctgttacacctaactttttgtgtggtgccctcctccttgtcaatattaatgttaaagtgcaattctttttccttatcacgttgagccattagtatcaatttgcttacctgtattcctttactatcctcctttttctccttcttgataaatgtatgtagattgcgtatatagtttcgtctaccctatgaacatattccattttgtaatttcgtgtcgtttctattatgaatttcatttataaagtttatgtacaaatatcataaaaaaagagaatctttttaagcaaggattttcttaacttcttcggcgacagcatcaccgacttcggtggtactgttggaaccacctaaatcaccagttctgatacctgcatccaaaacctttttaactgcatcttcaatggccttaccttcttcaggcaagttcaatgacaatttcaacatcattgcagcagacaagatagtggcgatagggtcaaccttattctttggcaaatctggagcagaaccgtggcatggttcgtacaaaccaaatgcggtgttcttgtctggcaaagaggccaaggacgcagatggcaacaaacccaaggaacctgggataacggaggcttcatcggagatgatatcaccaaacatgttgctggtgattataataccatttaggtgggttgggttcttaactaggatcatggcggcagaatcaatcaattgatgttgaaccttcaatgtagggaattcgttcttgatggtttcctccacagtttttctccataatcttgaagaggccaaaacattagctttatccaaggaccaaataggcaatggtggctcatgttgtagggccatgaaagcggccattcttgtgattctttgcacttctggaacggtgtattgttcactatcccaagcgacaccatcaccatcgtcttcctttctcttaccaaagtaaatacctcccactaattctctgacaacaacgaagtcagtacctttagcaaattgtggcttgattggagataagtctaaaagagagtcggatgcaaagttacatggtcttaagttggcgtacaattgaagttctttacggatttttagtaaaccttgttcaggtctaacactaccggtaccccatttaggaccacccacagcacctaacaaaacggcatcaaccttcttggaggcttccagcgcctcatctggaagtgggacacctgtagcatcgatagcagcaccaccaattaaatgattttcgaaatcgaacttgacattggaacgaacatcagaaatagctttaagaaccttaatggcttcggctgtgatttcttgaccaacgtggtcacctggcaaaacgacgatcttcttaggggcagacataggggcagacattagaatggtatatccttgaaatatatatatatattgctgaaatgtaaaaggtaagaaaagttagaaagtaagacgattgctaaccacctattggaaaaaacaataggtccttaaataatattgtcaacttcaagtattgtgatgcaagcatttagtcatgaacgcttctctattctatatgaaaagccggttccggcctctcacctttcctttttctcccaatttttcagttgaaaaaggtatatgcgtcaggcgacctctgaaattaacaaaaaatttccagtcatcgaatttgattctgtgcgatagcgcccctgtgtgttctcgttatgttgaggaaaaaaataatggttgctaagagattcgaactcttgcatcttacgatacctgagtattcccacagttaactgcggtcaagatatttcttgaatcaggcgccgcatgccggtagaggtgtggtcaataagagcgacctcatgctatacctgagaaagcaacctgacctacaggaaagagttactcaagaataagaattttcgttttaaaacctaagagtcactttaaaatttgtatacacttattttttttataacttatttaataataaaaatcataaatcataagaaattcgcttatttagaagtgtcaacaacgtatctaccaacgatttgacccttttccatcttttcgtaaatttctggcaaggtagacaagccgacaaccttgattggagacttgaccaaacctctggcgaagaagtccaaagcttctgaataagccctcgtaatatattttcatgaagaatttaggtccaaaaaaaagatgggcattaattctagtcatttaaaaaattctatagatcagaggttacatggccaagattgaaacttagaggagtatagttacataaaagaaggcaaaacgatgtataaatgaaagaaattgagatggtgcacgatgcacagttgaagtgaacttgcggggtttttcagtatctacgattcatagatctggaattgggccggcctggccactagtcatcatgatatcctcgagggccgcctgggcctgtcgagagatctctttttttgggtttggtggggtatcttcatcatcgaatagatagttatatacatcatccattgtagtggtattaaacatccctgtagtgattccaaacgcgttatacgcagtttggtccgtccaaccaggtgacagtggttttgaattattaccatcatcaattttactagccgtgatttcattattcatgaagttatcatgaacgttagaggaggcaattggttgtgaaagcgcttgagaatttgtttgagttgttatgaggttcggaccgttgctactgttagtgaaagtgaaggacaatgagctatcagcaatattcccactttgattaaaattggcggcggtacccaattcgacctttctcttcttttttggaggctcgggaattaattccgctttatccatctttgcagcggccgcttgcaaaagcctaggcctccaaaaaagcctcctcactacttctggaatagctcagaggcagaggcggcctcggcctctgcataaataaaaaaaattagtcagccatggggcggagaatgggcggaactgggcggagttaggggcgggatgggcggagttaggggcgggactatggttgctgactaattgagatgcatgctttgcatacttctgcctgctggggagcctggggactttccacacctggttgctgactaattgagatgcatgctttgcatacttctgcctgctggggagcctggggactttccacaccctaactgacacacattccacagggcccggtacccagcttttgttccctttagtgagggttaattccgagcttggcgtaatcatggtcatagctgtttcctgtgtgaaattgttatccgctcacaattccacacaacataggagccggaagcataaagtgtaaagcctggggtgcctaatgagtgaggtaactcacattaattgcgttgcgctcactgcccgctttccagtcgggaaacctgtcgtgccagctgcattaatgaatcggccaacgcgcggggagaggcggtttgcgtattgggcgctcttccgcttcctcgctcactgactcgctgcgctcggtcgttcggctgcggcgagcggtatcagctcactcaaaggcggtaatacggttatccacagaatcaggggataacgcaggaaagaacatgtgagcaaaaggccagcaaaaggccaggaaccgtaaaaaggccgcgttgctggcgtttttccataggctcggcccccctgacgagcatcacaaaaatcgacgctcaagtcagaggtggcgaaacccgacaggactataaagataccaggcgttcccccctggaagctccctcgtgcgctctcctgttccgaccctgccgcttaccggatacctgtccgcctttctcccttcgggaagcgtggcgctttctcaatgctcacgctgtaggtatctcagttcggtgtaggtcgttcgctccaagctgggctgtgtgcacgaaccccccgttcagcccgaccgctgcgccttatccggtaactatcgtcttgagtccaacccggtaagacacgacttatcgccactggcagcagccactggtaacaggattagcagagcgaggtatgtaggcggtgctacagagttcttgaagtggtggcctaactacggctacactagaaggacagtatttggtatctgcgctctgctgaagccagttaccttcggaaaaagagttggtagctcttgatccggcaaacaaaccaccgctggtagcggtggtttttttgtttgcaagcagcagattacgcgcagaaaaaaaggatctcaagaagatcctttgatcttttctacggggtctgacgctcagtggaacgaaaactcacgttaagggattttggtcatgagattatcaaaaaggatcttcacctagatccttttaaattaaaaatgaagttttaaatcaatctaaagtatatatgagtaaacttggtctgacagttaccaatgcttaatcagtgaggcacctatctcagcgatctgtctatttcgttcatccatagttgcctgactgcccgtcgtgtagataactacgatacgggagggcttaccatctggccccagtgctgcaatgataccgcgagacccacgctcaccggctccagatttatcagcaataaaccagccagccggaagggccgagcgcagaagtggtcctgcaactttatccgcctccatccagtctattaattgttgccgggaagctagagtaagtagttcgccagttaatagtttgcgcaacgttgttgccattgctacaggcatcgtggtgtcacgctcgtcgtttggtatggcttcattcagctccggttcccaacgatcaaggcgagttacatgatcccccatgttgtgaaaaaaagcggttagctccttcggtcctccgatcgttgtcagaagtaagttggccgcagtgttatcactcatggttatggcagcactgcataattctcttactgtcatgccatccgtaagatgcttttctgtgactggtgagtactcaaccaagtcattctgagaatagtgtatgcggcgaccgagttgctcttgcccggcgtcaatacgggataataccgcgccacatagcagaactttaaaagtgctcatcattggaaaacgttcttcggggcgaaaactctcaaggatcttaccgctgttgagatccagttcgatgtaacccactcgtgcacccaactgatcttcagcatcttttactttcaccagcgtttctgggtgagcaaaaacaggaaggcaaaatgccgcaaaaaagggaataagggcgacacggaaatgttgaatactcatactcttcctttttcaatattattgaagcatttatcagggttattgtctcatgagcggatacatatttgaatgtatttagaaaaataaacaaataggggttccgcgcacatttccccgaaaagtgccacctgggtccttttcatcacgtgctataaaaataattataatttaaattttttaatataaatatataaattaaaaatagaaagtaaaaaaagaaattaaagaaaaaatagtttttgttttccgaagatgtaaaagactctagggggatcgccaacaaatactaccttttatcttgctcttcctgctctcaggtattaatgccgaattgtttcatcttgtctgtgtagaagaccacacacgaaaatcctgtgattttacattttacttatcgttaatcgaatgtatatctatttaatctgcttttcttgtctaataaatatatatgtaaagtacgctttttgttgaaattttttaaacctttgtttatttttttttcttcattccgtaactcttctaccttctttatttactttctaaaatccaaatacaaaacataaaaataaataaacacagagtaaattcccaaattattccatcattaaaagatacgaggcgcgtgtaagttacaggcaagcgatccgtcctaagaaaccattattatcatgacattaacctataaaaataggcgtatcacgaggccctttcgtc

SEQ ID NO: 276 - DNA, 6308 bp, Artificial Sequence
  synthetic construct
tcgcgcgtttcggtgatgacggtgaaaacctctgacacatgcagctcccggagacggtcacagcttgtctgtaagcggatgccgggagcagacaagcccgtcagggcgcgtcagcgggtgttggcgggtgtcggggctggcttaactatgcggcatcagagcagattgtactgagagtgcaccatatcgactacgtcgtaaggccgtttctgacagagtaaaattcttgagggaactttcaccattatgggaaatggttcaagaaggtattgacttaaactccatcaaatggtcaggtcattgagtgttttttatttgttgtatttttttttttttagagaaaatcctccaatatcaaattaggaatcgtagtttcatgattttctgttacacctaactttttgtgtggtgccctcctccttgtcaatattaatgttaaagtgcaattctttttccttatcacgttgagccattagtatcaatttgcttacctgtattcctttactatcctcctttttctccttcttgataaatgtatgtagattgcgtatatagtttcgtctaccctatgaacatattccattttgtaatttcgtgtcgtttctattatgaatttcatttataaagtttatgtacaaatatcataaaaaaagagaatctttttaagcaaggattttcttaacttcttcggcgacagcatcaccgacttcggtggtactgttggaaccacctaaatcaccagttctgatacctgcatccaaaacctttttaactgcatcttcaatggccttaccttcttcaggcaagttcaatgacaatttcaacatcattgcagcagacaagatagtggcgatagggtcaaccttattctttggcaaatctggagcagaaccgtggcatggttcgtacaaaccaaatgcggtgttcttgtctggcaaagaggccaaggacgcagatggcaacaaacccaaggaacctgggataacggaggcttcatcggagatgatatcaccaaacatgttgctggtgattataataccatttaggtgggttgggttcttaactaggatcatggcggcagaatcaatcaattgatgttgaaccttcaatgtagggaattcgttcttgatggtttcctccacagtttttctccataatcttgaagaggccaaaacattagctttatccaaggaccaaataggcaatggtggctcatgttgtagggccatgaaagcggccattcttgtgattctttgcacttctggaacggtgtattgttcactatcccaagcgacaccatcaccatcgtcttcctttctcttaccaaagtaaatacctcccactaattctctgacaacaacgaagtcagtacctttagcaaattgtggcttgattggagataagtctaaaagagagtcggatgcaaagttacatggtcttaagttggcgtacaattgaagttctttacggatttttagtaaaccttgttcaggtctaacactaccggtaccccatttaggaccacccacagcacctaacaaaacggcatcaaccttcttggaggcttccagcgcctcatctggaagtgggacacctgtagcatcgatagcagcaccaccaattaaatgattttcgaaatcgaacttgacattggaacgaacatcagaaatagctttaagaaccttaatggcttcggctgtgatttcttgaccaacgtggtcacctggcaaaacgacgatcttcttaggggcagacataggggcagacattagaatggtatatccttgaaatatatatatatattgctgaaatgtaaaaggtaagaaaagttagaaagtaagacgattgctaaccacctattggaaaaaacaataggtccttaaataatattgtcaacttcaagtattgtgatgcaagcatttagtcatgaacgcttctctattctatatgaaaagccggttccggcctctcacctttcctttttctcccaatttttcagttgaaaaaggtatatgcgtcaggcgacctctgaaattaacaaaaaatttccagtcatcgaatttgattctgtgcgatagcgcccctgtgtgttctcgttatgttgaggaaaaaaataatggttgctaagagattcgaactcttgcatcttacgatacctgagtattcccacagttaactgcggtcaagatatttcttgaatcaggcgccgcatgccggtagaggtgtggtcaataagagcgacctcatgctatacctgagaaagcaacctgacctacaggaaagagttactcaagaataagaattttcgttttaaaacctaagagtcactttaaaatttgtatacacttattttttttataacttatttaataataaaaatcataaatcataagaaattcgcttatttagaagtgtcaacaacgtatctaccaacgatttgacccttttccatcttttcgtaaatttctggcaaggtagacaagccgacaaccttgattggagacttgaccaaacctctggcgaagaagtccaaagcttctgaataagccctcgtaatatattttcatgaagaatttaggtccaaaaaaaagatgggcattaattctagtcatttaaaaaattctatagatcagaggttacatggccaagattgaaacttagaggagtatagttacataaaagaaggcaaaacgatgtataaatgaaagaaattgagatggtgcacgatgcacagttgaagtgaacttgcggggtttttcagtatctacgattcatagatctggaattgggccggcctggccactagtcatcatgatatcctcgagggccgcctgggcctgtcgagagatctctttttttgggtttggtggggtatcttcatcatcgaatagatagttatatacatcatccattgtagtggtattaaacatccctgtagtgattccaaacgcgttatacgcagtttggtccgtccaaccaggtgacagtggttttgaattattaccatcatcaattttactagccgtgatttcattattcatgaagttatcatgaacgttagaggaggcaattggttgtgaaagcgcttgagaatttgtttgagttgttatgaggttcggaccgttgctactgttagtgaaagtgaaggacaatgagctatcagcaatattcccactttgattaaaattggcggcggtacccaattcgacctttctcttcttttttggaggctcgggaattaattccgctttatccatctttgcagcggccgcagccatggggcggagaatgggcggaactgggcggagttaggggcgggatgggcggagttaggggcgggactatggttgctgactaattgagatgcatgctttgcatacttctgcctgctggggagcctggggactttccacacctggttgctgactaattgagatgcatgctttgcatacttctgcctgctggggagcctggggactttccacaccctaactgacacacattccacagggcccggtacccagcttttgttccctttagtgagggttaattccgagcttggcgtaatcatggtcatagctgtttcctgtgtgaaattgttatccgctcacaattccacacaacataggagccggaagcataaagtgtaaagcctggggtgcctaatgagtgaggtaactcacattaattgcgttgcgctcactgcccgctttccagtcgggaaacctgtcgtgccagctgcattaatgaatcggccaacgcgcggggagaggcggtttgcgtattgggcgctcttccgcttcctcgctcactgactcgctgcgctcggtcgttcggctgcggcgagcggtatcagctcactcaaaggcggtaatacggttatccacagaatcaggggataacgcaggaaagaacatgtgagcaaaaggccagcaaaaggccaggaaccgtaaaaaggccgcgttgctggcgtttttccataggctcggcccccctgacgagcatcacaaaaatcgacgctcaagtcagaggtggcgaaacccgacaggactataaagataccaggcgttcccccctggaagctccctcgtgcgctctcctgttccgaccctgccgcttaccggatacctgtccgcctttctcccttcgggaagcgtggcgctttctcaatgctcacgctgtaggtatctcagttcggtgtaggtcgttcgctccaagctgggctgtgtgcacgaaccccccgttcagcccgaccgctgcgccttatccggtaactatcgtcttgagtccaacccggtaagacacgacttatcgccactggcagcagccactggtaacaggattagcagagcgaggtatgtaggcggtgctacagagttcttgaagtggtggcctaactacggctacactagaaggacagtatttggtatctgcgctctgctgaagccagttaccttcggaaaaagagttggtagctcttgatccggcaaacaaaccaccgctggtagcggtggtttttttgtttgcaagcagcagattacgcgcagaaaaaaaggatctcaagaagatcctttgatcttttctacggggtctgacgctcagtggaacgaaaactcacgttaagggattttggtcatgagattatcaaaaaggatcttcacctagatccttttaaattaaaaatgaagttttaaatcaatctaaagtatatatgagtaaacttggtctgacagttaccaatgcttaatcagtgaggcacctatctcagcgatctgtctatttcgttcatccatagttgcctgactgcccgtcgtgtagataactacgatacgggagggcttaccatctggccccagtgctgcaatgataccgcgagacccacgctcaccggctccagatttatcagcaataaaccagccagccggaagggccgagcgcagaagtggtcctgcaactttatccgcctccatccagtctattaattgttgccgggaagctagagtaagtagttcgccagttaatagtttgcgcaacgttgttgccattgctacaggcatcgtggtgtcacgctcgtcgtttggtatggcttcattcagctccggttcccaacgatcaaggcgagttacatgatcccccatgttgtgaaaaaaagcggttagctccttcggtcctccgatcgttgtcagaagtaagttggccgcagtgttatcactcatggttatggcagcactgcataattctcttactgtcatgccatccgtaagatgcttttctgtgactggtgagtactcaaccaagtcattctgagaatagtgtatgcggcgaccgagttgctcttgcccggcgtcaatacgggataataccgcgccacatagcagaactttaaaagtgctcatcattggaaaacgttcttcggggcgaaaactctcaaggatcttaccgctgttgagatccagttcgatgtaacccactcgtgcacccaactgatcttcagcatcttttactttcaccagcgtttctgggtgagcaaaaacaggaaggcaaaatgccgcaaaaaagggaataagggcgacacggaaatgttgaatactcatactcttcctttttcaatattattgaagcatttatcagggttattgtctcatgagcggatacatatttgaatgtatttagaaaaataaacaaataggggttccgcgcacatttccccgaaaagtgccacctgggtccttttcatcacgtgctataaaaataattataatttaaattttttaatataaatatataaattaaaaatagaaagtaaaaaaagaaattaaagaaaaaatagtttttgttttccgaagatgtaaaagactctagggggatcgccaacaaatactaccttttatcttgctcttcctgctctcaggtattaatgccgaattgtttcatcttgtctgtgtagaagaccacacacgaaaatcctgtgattttacattttacttatcgttaatcgaatgtatatctatttaatctgcttttcttgtctaataaatatatatgtaaagtacgctttttgttgaaattttttaaacctttgtttatttttttttcttcattccgtaactcttctaccttctttatttactttctaaaatccaaatacaaaacataaaaataaataaacacagagtaaattcccaaattattccatcattaaaagatacgaggcgcgtgtaagttacaggcaagcgatccgtcctaagaaaccattattatcatgacattaacctataaaaataggcgtatcacgaggccctttcgtc

SEQ ID NO: 277 - DNA, 8068 bp, Artificial Sequence
  synthetic construct
  misc_feature (1062)..(1062): n is a, c, g, or t
gacggatcgggagatctcccgatcccctatggtgcactctcagtacaatctgctctgatgccgcatagttaagccagtatctgctccctgcttgtgtgttggaggtcgctgagtagtgcgcgagcaaaatttaagctacaacaaggcaaggcttgaccgacaattgcatgaagaatctgcttagggttaggcgttttgcgctgcttcgcgatgtacgggccagatatacgcgtttcgaagatatcgttgacattgattattgtctagttattaatagtaatcaattacggggtcattagttcatagcccatatatggagttccgcgttacataacttacggtaaatggcccgcctggctgaccgcccaacgacccccgcccattgacgtcaataatgacgtatgttcccatagtaacgccaatagggactttccattgacgtcaatgggtggagtatttacggtaaactgcccacttggcagtacatcaagtgtatcatatgccaagtacgccccctattgacgtcaatgacggtaaatggcccgcctggcattatgcccagtacatgaccttatgggactttcctacttggcagtacatctacgtattagtcatcgctattaccatggtgatgcggttttggcagtacatcaatgggcgtggatagcggtttgactcacggggatttccaagtctccaccccattgacgtcaatgggagtttgttttggcaccaaaatcaacgggactttccaaaatgtcgtaacaactccgccccattgacgcaaatgggcggtaggcgtgtacggtgggaggtctatataagcacttaagctggagctttgggaggagacggggaggacagactggaggcgtgggcccactagtgtttagtgaaccgtcagatcgcctggagacgccatccacgctgttttgacctccatagaagacaccgggaccgatccagcctccggactctagcctcgagcccaagcttggtaccgagctcggatccagccaccatgggagtcaaagttctgtttgccctgatctgcatcgctgnggccgaggccaagcccaccgagaacaacgaagacttcaacatcgtggccgtggccagcaacttcgcgaccacggatctcgatgctgaccgcgggaagttgcccggcaagaagctgccgctggaggtgctcaaagagctggaagccaatgcccggaaagctggctgcaccaggggctgtctgatctgcctgtcccacatcaagtgcacgcccaagatgaagaagttcatcccaggacgctgccacacctacgaaggcgacaaagagtccgcacagggcggcataggcgaggcgatcgtcgacattcctgagattcctgggttcaaggacttggagcccctggagcagttcatcgcacaggtcgatctgtgtgtggactgcacaactggctgcctcaaagggcttgccaacgtgcagtgttctgacctgctcaagaagtggctgccgcaacgctgtgcgacctttgccagcaagatccagggccaggtggacaagatcaagggggccggtggtgactaagcggccgcttcgagcagacatgataagatacattgatgagtttggacaaaccacaactagaatgcagtgaaaaaaatgctttatttgtgaaatttgtgatgctattgctttatttgtaaccattataagctgcaataaacaagttaacaacaacaattgcattcattttatgtttcaggttcagggggaggtgtgggaggttttttaaagcaagtaaaacctctacaaatgtggtacaaccggtctagttattaatagtaatcaattacggggtcattagttcatagcccatatatggagttccgcgttacataacttacggtaaatggcccgcctggctgaccgcccaacgacccccgcccattgacgtcaataatgacgtatgttcccatagtaacgccaatagggactttccattgacgtcaatgggtggagtatttacggtaaactgcccacttggcagtacatcaagtgtatcatatgccaagtacgccccctattgacgtcaatgacggtaaatggcccgcctggcattatgcccagtacatgaccttatgggactttcctacttggcagtacatctacgtattagtcatcgctattaccatggtgatgcggttttggcagtacatcaatgggcgtggatagcggtttgactcacggggatttccaagtctccaccccattgacgtcaatgggagtttgttttggcaccaaaatcaacgggactttccaaaatgtcgtaacaactccgccccattgacgcaaatgggcggtaggcgtgtacggtgggaggtctatataagcagagctctctggctaactagagaacccactgcttactggcttatcgaaattttaattaacgttggcaccatgctgctgctgctgctgctgctgggcctgaggctacagctctccctgggcatcatcccagttgaggaggagaacccggacttctggaaccgcgaggcagccgaggccctgggtgccgccaagaagctgcagcctgcacagacagccgccaagaacctcatcatcttcctgggcgatgggatgggggtgtctacggtgacagctgccaggatcctaaaagggcagaagaaggacaaactggggcctgagatacccctggccatggaccgcttcccatatgtggctctgtccaagacatacaatgtagacaaacatgtgccagacagtggagccacagccacggcctacctgtgcggggtcaagggcaacttccagaccattggcttgagtgcagccgcccgctttaaccagtgcaacacgacacgcggcaacgaggtcatctccgtgatgaatcgggccaagaaagcagggaagtcagtgggagtggtaaccaccacacgagtgcagcacgcctcgccagccggcacctacgcccacacggtgaaccgcaactggtactcggacgccgacgtgcctgcctcggcccgccaggaggggtgccaggacatcgctacgcagctcatctccaacatggacattgacgtgatcctaggtggaggccgaaagtacatgtttcgcatgggaaccccagaccctgagtacccagatgactacagccaaggtgggaccaggctggacgggaagaatctggtgcaggaatggctggcgaagcgccagggtgcccggtatgtgtggaaccgcactgagctcatgcaggcttccctggacccgtctgtgacccatctcatgggtctctttgagcctggagacatgaaatacgagatccaccgagactccacactggacccctccctgatggagatgacagaggctgccctgcgcctgctgagcaggaacccccgcggcttcttcctcttcgtggagggtggtcgcatcgaccatggtcatcatgaaagcagggcttaccgggcactgactgagacgatcatgttcgacgacgccattgagagggcgggccagctcaccagcgaggaggacacgctgagcctcgtcactgccgaccactcccacgtcttctccttcggaggctaccccctgcgagggagctccatcttcgggctggcccctggcaaggcccgggacaggaaggcctacacggtcctcctatacggaaacggtccaggctatgtgctcaaggacggcgcccggccggatgttaccgagagcgagagcgggagccccgagtatcggcagcagtcagcagtgcccctggacgaagagacccacgcaggcgaggacgtggcggtgttcgcgcgcggcccgcaggcgcacctggttcacggcgtgcaggagcagaccttcatagcgcacgtcatggccttcgccgcctgcctggagccctacaccgcctgcgacctggcgccccccgccggcaccaccgacgccgcgcacccgggttactctagagtcggggcggccggctaggtttaaacccgctgatcagcctcgactgtgccttctagttgccagccatctgttgtttgcccctcccccgtgccttccttgaccctggaaggtgccactcccactgtcctttcctaataaaatgaggaaattgcatcgcattgtctgagtaggtgtcattctattctggggggtggggtggggcaggacagcaagggggaggattgggaagacaatagcaggcatgctggggatgcggtgggctctatggcttctgaggcggaaagaaccagctggggctctagggggtatccccacgcgccctgtagcggcgcattaagcgcggcgggtgtggtggttacgcgcagcgtgaccgctacacttgccagcgccctagcgcccgctcctttcgctttcttcccttcctttctcgccacgttcgccggctttccccgtcaagctctaaatcgggggctccctttagggttccgatttagtgctttacggcacctcgaccccaaaaaacttgattagggtgatggttcacgtacctagaagttcctattccgaagttcctattctctagaaagtataggaacttccttggccaaaaagcctgaactcaccgcgacgtctgtcgagaagtttctgatcgaaaagttcgacagcgtctccgacctgatgcagctctcggagggcgaagaatctcgtgctttcagcttcgatgtaggagggcgtggatatgtcctgcgggtaaatagctgcgccgatggtttctacaaagatcgttatgtttatcggcactttgcatcggccgcgctcccgattccggaagtgcttgacattggggaattcagcgagagcctgacctattgcatctcccgccgtgcacagggtgtcacgttgcaagacctgcctgaaaccgaactgcccgctgttctgcagccggtcgcggaggccatggatgcgatcgctgcggccgatcttagccagacgagcgggttcggcccattcggaccgcaaggaatcggtcaatacactacatggcgtgatttcatatgcgcgattgctgatccccatgtgtatcactggcaaactgtgatggacgacaccgtcagtgcgtccgtcgcgcaggctctcgatgagctgatgctttgggccgaggactgccccgaagtccggcacctcgtgcacgcggatttcggctccaacaatgtcctgacggacaatggccgcataacagcggtcattgactggagcgaggcgatgttcggggattcccaatacgaggtcgccaacatcttcttctggaggccgtggttggcttgtatggagcagcagacgcgctacttcgagcggaggcatccggagcttgcaggatcgccgcggctccgggcgtatatgctccgcattggtcttgaccaactctatcagagcttggttgacggcaatttcgatgatgcagcttgggcgcagggtcgatgcgacgcaatcgtccgatccggagccgggactgtcgggcgtacacaaatcgcccgcagaagcgcggccgtctggaccgatggctgtgtagaagtactcgccgatagtggaaaccgacgccccagcactcgtccgagggcaaaggaatagcacgtactacgagatttcgattccaccgccgccttctatgaaaggttgggcttcggaatcgttttccgggacgccggctggatgatcctccagcgcggggatctcatgctggagttcttcgcccaccccaacttgtttattgcagcttataatggttacaaataaagcaatagcatcacaaatttcacaaataaagcatttttttcactgcattctagttgtggtttgtccaaactcatcaatgtatcttatcatgtctgtataccgtcgacctctagctagagcttggcgtaatcatggtcatagctgtttcctgtgtgaaattgttatccgctcacaattccacacaacatacgagccggaagcataaagtgtaaagcctggggtgcctaatgagtgagctaactcacattaattgcgttgcgctcactgcccgctttccagtcgggaaacctgtcgtgccagctgcattaatgaatcggccaacgcgcggggagaggcggtttgcgtattgggcgctcttccgcttcctcgctcactgactcgctgcgctcggtcgttcggctgcggcgagcggtatcagctcactcaaaggcggtaatacggttatccacagaatcaggggataacgcaggaaagaacatgtgagcaaaaggccagcaaaaggccaggaaccgtaaaaaggccgcgttgctggcgtttttccataggctccgcccccctgacgagcatcacaaaaatcgacgctcaagtcagaggtggcgaaacccgacaggactataaagataccaggcgtttccccctggaagctccctcgtgcgctctcctgttccgaccctgccgcttaccggatacctgtccgcctttctcccttcgggaagcgtggcgctttctcatagctcacgctgtaggtatctcagttcggtgtaggtcgttcgctccaagctgggctgtgtgcacgaaccccccgttcagcccgaccgctgcgccttatccggtaactatcgtcttgagtccaacccggtaagacacgacttatcgccactggcagcagccactggtaacaggattagcagagcgaggtatgtaggcggtgctacagagttcttgaagtggtggcctaactacggctacactagaagaacagtatttggtatctgcgctctgctgaagccagttaccttcggaaaaagagttggtagctcttgatccggcaaacaaaccaccgctggtagcggtggtttttttgtttgcaagcagcagattacgcgcagaaaaaaaggatctcaagaagatcctttgatcttttctacggggtctgacgctcagtggaacgaaaactcacgttaagggattttggtcatgagattatcaaaaaggatcttcacctagatccttttaaattaaaaatgaagttttaaatcaatctaaagtatatatgagtaaacttggtctgacagttaccaatgcttaatcagtgaggcacctatctcagcgatctgtctatttcgttcatccatagttgcctgactccccgtcgtgtagataactacgatacgggagggcttaccatctggccccagtgctgcaatgataccgcgagacccacgctcaccggctccagatttatcagcaataaaccagccagccggaagggccgagcgcagaagtggtcctgcaactttatccgcctccatccagtctattaattgttgccgggaagctagagtaagtagttcgccagttaatagtttgcgcaacgttgttgccattgctacaggcatcgtggtgtcacgctcgtcgtttggtatggcttcattcagctccggttcccaacgatcaaggcgagttacatgatcccccatgttgtgcaaaaaagcggttagctccttcggtcctccgatcgttgtcagaagtaagttggccgcagtgttatcactcatggttatggcagcactgcataattctcttactgtcatgccatccgtaagatgcttttctgtgactggtgagtactcaaccaagtcattctgagaatagtgtatgcggcgaccgagttgctcttgcccggcgtcaatacgggataataccgcgccacatagcagaactttaaaagtgctcatcattggaaaacgttcttcggggcgaaaactctcaaggatcttaccgctgttgagatccagttcgatgtaacccactcgtgcacccaactgatcttcagcatcttttactttcaccagcgtttctgggtgagcaaaaacaggaaggcaaaatgccgcaaaaaagggaataagggcgacacggaaatgttgaatactcatactcttcctttttcaatattattgaagcatttatcagggttattgtctcatgagcggatacatatttgaatgtatttagaaaaataaacaaataggggttccgcgcacatttccccgaaaagtgccacctgacgtc

SEQ ID NO: 278 - DNA, 6083 bp, Artificial Sequence
  Synthetic construct
gacggatcgggagatctcccgatcccctatggtgcactctcagtacaatctgctctgatgccgcatagttaagccagtatctgctccctgcttgtgtgttggaggtcgctgagtagtgcgcgagcaaaatttaagctacaacaaggcaaggcttgaccgacaattgcatgaagaatctgcttagggttaggcgttttgcgctgcttcgcgatgtacgggccagatatacgcgttgacattgattattgactagttattaatagtaatcaattacggggtcattagttcatagcccatatatggagttccgcgttacataacttacggtaaatggcccgcctggctgaccgcccaacgacccccgcccattgacgtcaataatgacgtatgttcccatagtaacgccaatagggactttccattgacgtcaatgggtggagtatttacggtaaactgcccacttggcagtacatcaagtgtatcatatgccaagtacgccccctattgacgtcaatgacggtaaatggcccgcctggcattatgcccagtacatgaccttatgggactttcctacttggcagtacatctacgtattagtcatcgctattaccatggtgatgcggttttggcagtacatcaatgggcgtggatagcggtttgactcacggggatttccaagtctccaccccattgacgtcaatgggagtttgttttggcaccaaaatcaacgggactttccaaaatgtcgtaacaactccgccccattgacgcaaatgggcggtaggcgtgtacggtgggaggtctatataagcagagctctctggctaactagagaacccactgcttactggcttatcgaaattaatacgactcactatagggagacccaagctggctagcgtttaaacgggccctctagagatatcatggatgctaagtccctgacagcgtggagccgcacactggttaccttcaaagatgttttcgtggatttcacccgcgaagagtggaaactgctggataccgcacagcagattgtgtatcgcaacgttatgctggaaaactacaagaatctggttagcctgggctatcagctgacaaaacccgacgtcatcctgcgtctggaaaagggtgaagagccgtggctggttgaacgggagattcaccaggagacacatcctgattctgaaactgcctttgagatcaaaagctccgtcagtccgaaaaagaaacgtaaagtggggctcgagcccggggaaaagccatataaatgccccgagtgcggcaaatcattcagccaaagtagcaacttagtaagacaccagcgcacccataccggggaaaagccatataaatgccccgagtgcggcaaatcattcagccaaagtagcaacttagtaagacaccagcgcacccataccggggaaaagccatataaatgccccgagtgcggcaaatcattcagccaaagtagcaacttagtaagacaccagcgcacccataccggtgagcagaaactcatctctgaagaagatctggaacaaaagttgatttcagaagaagatctggaacagaagctcatctctgaggaagatctgtaagcggccgcgaattccaccacactggactagtggatccgagctcggtaccaagcttaagtttaaaccgctgatcagcctcgactgtgccttctagttgccagccatctgttgtttgcccctcccccgtgccttccttgaccctggaaggtgccactcccactgtcctttcctaataaaatgaggaaattgcatcgcattgtctgagtaggtgtcattctattctggggggtggggtggggcaggacagcaagggggaggattgggaagacaatagcaggcatgctggggatgcggtgggctctatggcttctgaggcggaaagaaccagctggggctctagggggtatccccacgcgccctgtagcggcgcattaagcgcggcgggtgtggtggttacgcgcagcgtgaccgctacacttgccagcgccctagcgcccgctcctttcgctttcttcccttcctttctcgccacgttcgccggctttccccgtcaagctctaaatcgggggctccctttagggttccgatttagtgctttacggcacctcgaccccaaaaaacttgattagggtgatggttcacgtagtgggccatcgccctgatagacggtttttcgccctttgacgttggagtccacgttctttaatagtggactcttgttccaaactggaacaacactcaaccctatctcggtctattcttttgatttataagggattttgccgatttcggcctattggttaaaaaatgagctgatttaacaaaaatttaacgcgaattaattctgtggaatgtgtgtcagttagggtgtggaaagtccccaggctccccagcaggcagaagtatgcaaagcatgcatctcaattagtcagcaaccaggtgtggaaagtccccaggctccccagcaggcagaagtatgcaaagcatgcatctcaattagtcagcaaccatagtcccgcccctaactccgcccatcccgcccctaactccgcccagttccgcccattctccgccccatggctgactaattttttttatttatgcagaggccgaggccgcctctgcctctgagctattccagaagtagtgaggaggcttttttggaggcctaggcttttgcaaaaagctcccgggagcttgtatatccattttcggatctgatcaagagacaggatgaggatcgtttcgcatgattgaacaagatggattgcacgcaggttctccggccgcttgggtggagaggctattcggctatgactgggcacaacagacaatcggctgctctgatgccgccgtgttccggctgtcagcgcaggggcgcccggttctttttgtcaagaccgacctgtccggtgccctgaatgaactgcaggacgaggcagcgcggctatcgtggctggccacgacgggcgttccttgcgcagctgtgctcgacgttgtcactgaagcgggaagggactggctgctattgggcgaagtgccggggcaggatctcctgtcatctcaccttgctcctgccgagaaagtatccatcatggctgatgcaatgcggcggctgcatacgcttgatccggctacctgcccattcgaccaccaagcgaaacatcgcatcgagcgagcacgtactcggatggaagccggtcttgtcgatcaggatgatctggacgaagagcatcaggggctcgcgccagccgaactgttcgccaggctcaaggcgcgcatgcccgacggcgaggatctcgtcgtgacccatggcgatgcctgcttgccgaatatcatggtggaaaatggccgcttttctggattcatcgactgtggccggctgggtgtggcggaccgctatcaggacatagcgttggctacccgtgatattgctgaagagcttggcggcgaatgggctgaccgcttcctcgtgctttacggtatcgccgctcccgattcgcagcgcatcgccttctatcgccttcttgacgagttcttctgagcgggactctggggttcgaaatgaccgaccaagcgacgcccaacctgccatcacgagatttcgattccaccgccgccttctatgaaaggttgggcttcggaatcgttttccgggacgccggctggatgatcctccagcgcggggatctcatgctggagttcttcgcccaccccaacttgtttattgcagcttataatggttacaaataaagcaatagcatcacaaatttcacaaataaagcatttttttcactgcattctagttgtggtttgtccaaactcatcaatgtatcttatcatgtctgtataccgtcgacctctagctagagcttggcgtaatcatggtcatagctgtttcctgtgtgaaattgttatccgctcacaattccacacaacatacgagccggaagcataaagtgtaaagcctggggtgcctaatgagtgagctaactcacattaattgcgttgcgctcactgcccgctttccagtcgggaaacctgtcgtgccagctgcattaatgaatcggccaacgcgcggggagaggcggtttgcgtattgggcgctcttccgcttcctcgctcactgactcgctgcgctcggtcgttcggctgcggcgagcggtatcagctcactcaaaggcggtaatacggttatccacagaatcaggggataacgcaggaaagaacatgtgagcaaaaggccagcaaaaggccaggaaccgtaaaaaggccgcgttgctggcgtttttccataggctccgcccccctgacgagcatcacaaaaatcgacgctcaagtcagaggtggcgaaacccgacaggactataaagataccaggcgtttccccctggaagctccctcgtgcgctctcctgttccgaccctgccgcttaccggatacctgtccgcctttctcccttcgggaagcgtggcgctttctcatagctcacgctgtaggtatctcagttcggtgtaggtcgttcgctccaagctgggctgtgtgcacgaaccccccgttcagcccgaccgctgcgccttatccggtaactatcgtcttgagtccaacccggtaagacacgacttatcgccactggcagcagccactggtaacaggattagcagagcgaggtatgtaggcggtgctacagagttcttgaagtggtggcctaactacggctacactagaagaacagtatttggtatctgcgctctgctgaagccagttaccttcggaaaaagagttggtagctcttgatccggcaaacaaaccaccgctggtagcggtttttttgtttgcaagcagcagattacgcgcagaaaaaaaggatctcaagaagatcctttgatcttttctacggggtctgacgctcagtggaacgaaaactcacgttaagggattttggtcatgagattatcaaaaaggatcttcacctagatccttttaaattaaaaatgaagttttaaatcaatctaaagtatatatgagtaaacttggtctgacagttaccaatgcttaatcagtgaggcacctatctcagcgatctgtctatttcgttcatccatagttgcctgactccccgtcgtgtagataactacgatacgggagggcttaccatctggccccagtgctgcaatgataccgcgagacccacgctcaccggctccagatttatcagcaataaaccagccagccggaagggccgagcgcagaagtggtcctgcaactttatccgcctccatccagtctattaattgttgccgggaagctagagtaagtagttcgccagttaatagtttgcgcaacgttgttgccattgctacaggcatcgtggtgtcacgctcgtcgtttggtatggcttcattcagctccggttcccaacgatcaaggcgagttacatgatcccccatgttgtgcaaaaaagcggttagctccttcggtcctccgatcgttgtcagaagtaagttggccgcagtgttatcactcatggttatggcagcactgcataattctcttactgtcatgccatccgtaagatgcttttctgtgactggtgagtactcaaccaagtcattctgagaatagtgtatgcggcgaccgagttgctcttgcccggcgtcaatacgggataataccgcgccacatagcagaactttaaaagtgctcatcattggaaaacgttcttcggggcgaaaactctcaaggatcttaccgctgttgagatccagttcgatgtaacccactcgtgcacccaactgatcttcagcatcttttactttcaccagcgtttctgggtgagcaaaaacaggaaggcaaaatgccgcaaaaaagggaataagggcgacacggaaatgttgaatactcatactcttcctttttcaatattattgaagcatttatcagggttattgtctcatgagcggatacatatttgaatgtatttagaaaaataaacaaataggggttccgcgcacatttccccgaaaagtgccacctgacgtc

SEQ ID NO: 279 - DNA, 5916 bp, Artificial Sequence
  Synthetic construct
gacggatcgggagatctcccgatcccctatggtgcactctcagtacaatctgctctgatgccgcatagttaagccagtatctgctccctgcttgtgtgttggaggtcgctgagtagtgcgcgagcaaaatttaagctacaacaaggcaaggcttgaccgacaattgcatgaagaatctgcttagggttaggcgttttgcgctgcttcgcgatgtacgggccagatatacgcgttgacattgattattgactagttattaatagtaatcaattacggggtcattagttcatagcccatatatggagttccgcgttacataacttacggtaaatggcccgcctggctgaccgcccaacgacccccgcccattgacgtcaataatgacgtatgttcccatagtaacgccaatagggactttccattgacgtcaatgggtggagtatttacggtaaactgcccacttggcagtacatcaagtgtatcatatgccaagtacgccccctattgacgtcaatgacggtaaatggcccgcctggcattatgcccagtacatgaccttatgggactttcctacttggcagtacatctacgtattagtcatcgctattaccatggtgatgcggttttggcagtacatcaatgggcgtggatagcggtttgactcacggggatttccaagtctccaccccattgacgtcaatgggagtttgttttggcaccaaaatcaacgggactttccaaaatgtcgtaacaactccgccccattgacgcaaatgggcggtaggcgtgtacggtgggaggtctatataagcagagctctctggctaactagagaacccactgcttactggcttatcgaaattaatacgactcactatagggagacccaagctggctagcgtttaaacgggccctctagagatatcatgccgaaaaagaaacgtaaagtggggctcgagcccggggaaaagccatataaatgccccgagtgcggcaaatcattcagccaaagtagcaacttagtaagacaccagcgcacccataccggggaaaagccatataaatgccccgagtgcggcaaatcattcagccaaagtagcaacttagtaagacaccagcgcacccataccggggaaaagccatataaatgccccgagtgcggcaaatcattcagccaaagtagcaacttagtaagacaccagcgcacccataccggtggcggcagcggcggcagcgaattccgcacactggttaccttcaaagatgttttcgtggatttcacccgcgaagagtggaaactgctggataccgcacagcagattgtgtatcgcaacgttatgctggaaaactacaagaatctggttagcctgggctatggatccgagcagaaactcatctctgaagaagatctggaacaaaagttgatttcagaagaagatctggaacagaagctcatctctgaggaagatctgtaagcggccgcaagcttaagtttaaaccgctgatcagcctcgactgtgccttctagttgccagccatctgttgtttgcccctcccccgtgccttccttgaccctggaaggtgccactcccactgtcctttcctaataaaatgaggaaattgcatcgcattgtctgagtaggtgtcattctattctggggggtggggtggggcaggacagcaagggggaggattgggaagacaatagcaggcatgctggggatgcggtgggctctatggcttctgaggcggaaagaaccagctggggctctagggggtatccccacgcgccctgtagcggcgcattaagcgcggcgggtgtggtggttacgcgcagcgtgaccgctacacttgccagcgccctagcgcccgctcctttcgctttcttcccttcctttctcgccacgttcgccggctttccccgtcaagctctaaatcgggggctccctttagggttccgatttagtgctttacggcacctcgaccccaaaaaacttgattagggtgatggttcacgtagtgggccatcgccctgatagacggtttttcgccctttgacgttggagtccacgttctttaatagtggactcttgttccaaactggaacaacactcaaccctatctcggtctattcttttgatttataagggattttgccgatttcggcctattggttaaaaaatgagctgatttaacaaaaatttaacgcgaattaattctgtggaatgtgtgtcagttagggtgtggaaagtccccaggctccccagcaggcagaagtatgcaaagcatgcatctcaattagtcagcaaccaggtgtggaaagtccccaggctccccagcaggcagaagtatgcaaagcatgcatctcaattagtcagcaaccatagtcccgcccctaactccgcccatcccgcccctaactccgcccagttccgcccattctccgccccatggctgactaattttttttatttatgcagaggccgaggccgcctctgcctctgagctattccagaagtagtgaggaggcttttttggaggcctaggcttttgcaaaaagctcccgggagcttgtatatccattttcggatctgatcaagagacaggatgaggatcgtttcgcatgattgaacaagatggattgcacgcaggttctccggccgcttgggtggagaggctattcggctatgactgggcacaacagacaatcggctgctctgatgccgccgtgttccggctgtcagcgcaggggcgcccggttctttttgtcaagaccgacctgtccggtgccctgaatgaactgcaggacgaggcagcgcggctatcgtggctggccacgacgggcgttccttgcgcagctgtgctcgacgttgtcactgaagcgggaagggactggctgctattgggcgaagtgccggggcaggatctcctgtcatctcaccttgctcctgccgagaaagtatccatcatggctgatgcaatgcggcggctgcatacgcttgatccggctacctgcccattcgaccaccaagcgaaacatcgcatcgagcgagcacgtactcggatggaagccggtcttgtcgatcaggatgatctggacgaagagcatcaggggctcgcgccagccgaactgttcgccaggctcaaggcgcgcatgcccgacggcgaggatctcgtcgtgacccatggcgatgcctgcttgccgaatatcatggtggaaaatggccgcttttctggattcatcgactgtggccggctgggtgtggcggaccgctatcaggacatagcgttggctacccgtgatattgctgaagagcttggcggcgaatgggctgaccgcttcctcgtgctttacggtatcgccgctcccgattcgcagcgcatcgccttctatcgccttcttgacgagttcttctgagcgggactctggggttcgaaatgaccgaccaagcgacgcccaacctgccatcacgagatttcgattccaccgccgccttctatgaaaggttgggcttcggaatcgttttccgggacgccggctggatgatcctccagcgcggggatctcatgctggagttcttcgcccaccccaacttgtttattgcagcttataatggttacaaataaagcaatagcatcacaaatttcacaaataaagcatttttttcactgcattctagttgtggtttgtccaaactcatcaatgtatcttatcatgtctgtataccgtcgacctctagctagagcttggcgtaatcatggtcatagctgtttcctgtgtgaaattgttatccgctcacaattccacacaacatacgagccggaagcataaagtgtaaagcctggggtgcctaatgagtgagctaactcacattaattgcgttgcgctcactgcccgctttccagtcgggaaacctgtcgtgccagctgcattaatgaatcggccaacgcgcggggagaggcggtttgcgtattgggcgctcttccgcttcctcgctcactgactcgctgcgctcggtcgttcggctgcggcgagcggtatcagctcactcaaaggcggtaatacggttatccacagaatcaggggataacgcaggaaagaacatgtgagcaaaaggccagcaaaaggccaggaaccgtaaaaaggccgcgttgctggcgtttttccataggctccgcccccctgacgagcatcacaaaaatcgacgctcaagtcagaggtggcgaaacccgacaggactataaagataccaggcgtttccccctggaagctccctcgtgcgctctcctgttccgaccctgccgcttaccggatacctgtccgcctttctcccttcgggaagcgtggcgctttctcatagctcacgctgtaggtatctcagttcggtgtaggtcgttcgctccaagctgggctgtgtgcacgaaccccccgttcagcccgaccgctgcgccttatccggtaactatcgtcttgagtccaacccggtaagacacgacttatcgccactggcagcagccactggtaacaggattagcagagcgaggtatgtaggcggtgctacagagttcttgaagtggtggcctaactacggctacactagaagaacagtatttggtatctgcgctctgctgaagccagttaccttcggaaaaagagttggtagctcttgatccggcaaacaaaccaccgctggtagcggtttttttgtttgcaagcagcagattacgcgcagaaaaaaaggatctcaagaagatcctttgatcttttctacggggtctgacgctcagtggaacgaaaactcacgttaagggattttggtcatgagattatcaaaaaggatcttcacctagatccttttaaattaaaaatgaagttttaaatcaatctaaagtatatatgagtaaacttggtctgacagttaccaatgcttaatcagtgaggcacctatctcagcgatctgtctatttcgttcatccatagttgcctgactccccgtcgtgtagataactacgatacgggagggcttaccatctggccccagtgctgcaatgataccgcgagacccacgctcaccggctccagatttatcagcaataaaccagccagccggaagggccgagcgcagaagtggtcctgcaactttatccgcctccatccagtctattaattgttgccgggaagctagagtaagtagttcgccagttaatagtttgcgcaacgttgttgccattgctacaggcatcgtggtgtcacgctcgtcgtttggtatggcttcattcagctccggttcccaacgatcaaggcgagttacatgatcccccatgttgtgcaaaaaagcggttagctccttcggtcctccgatcgttgtcagaagtaagttggccgcagtgttatcactcatggttatggcagcactgcataattctcttactgtcatgccatccgtaagatgcttttctgtgactggtgagtactcaaccaagtcattctgagaatagtgtatgcggcgaccgagttgctcttgcccggcgtcaatacgggataataccgcgccacatagcagaactttaaaagtgctcatcattggaaaacgttcttcggggcgaaaactctcaaggatcttaccgctgttgagatccagttcgatgtaacccactcgtgcacccaactgatcttcagcatcttttactttcaccagcgtttctgggtgagcaaaaacaggaaggcaaaatgccgcaaaaaagggaataagggcgacacggaaatgttgaatactcatactcttcctttttcaatattattgaagcatttatcagggttattgtctcatgagcggatacatatttgaatgtatttagaaaaataaacaaataggggttccgcgcacatttccccgaaaagtgccacctgacgtc

SEQ ID NO: 280 - DNA, 5897 bp, Artificial Sequence
  Synthetic construct
gacggatcgggagatctcccgatcccctatggtgcactctcagtacaatctgctctgatgccgcatagttaagccagtatctgctccctgcttgtgtgttggaggtcgctgagtagtgcgcgagcaaaatttaagctacaacaaggcaaggcttgaccgacaattgcatgaagaatctgcttagggttaggcgttttgcgctgcttcgcgatgtacgggccagatatacgcgttgacattgattattgactagttattaatagtaatcaattacggggtcattagttcatagcccatatatggagttccgcgttacataacttacggtaaatggcccgcctggctgaccgcccaacgacccccgcccattgacgtcaataatgacgtatgttcccatagtaacgccaatagggactttccattgacgtcaatgggtggagtatttacggtaaactgcccacttggcagtacatcaagtgtatcatatgccaagtacgccccctattgacgtcaatgacggtaaatggcccgcctggcattatgcccagtacatgaccttatgggactttcctacttggcagtacatctacgtattagtcatcgctattaccatggtgatgcggttttggcagtacatcaatgggcgtggatagcggtttgactcacggggatttccaagtctccaccccattgacgtcaatgggagtttgttttggcaccaaaatcaacgggactttccaaaatgtcgtaacaactccgccccattgacgcaaatgggcggtaggcgtgtacggtgggaggtctatataagcagagctctctggctaactagagaacccactgcttactggcttatcgaaattaatacgactcactatagggagacccaagctggctagcgtttaaacgggccctctagagatatcatggcggcggcggttcggatgaacatccagatgctgctggaggcggccgactatctggagcggcgggagagagaagctgaacatggttatgcctccatgttaccatacccgaaaaagaaacgtaaagtggggctcgagcccggggaaaagccatataaatgccccgagtgcggcaaatcattcagccaaagtagcaacttagtaagacaccagcgcacccataccggggaaaagccatataaatgccccgagtgcggcaaatcattcagccaaagtagcaacttagtaagacaccagcgcacccataccggggaaaagccatataaatgccccgagtgcggcaaatcattcagccaaagtagcaacttagtaagacaccagcgcacccataccggtgagcagaaactcatctctgaagaagatctggaacaaaagttgatttcagaagaagatctggaacagaagctcatctctgaggaagatctgtaagcggccgcgaattccaccacactggactagtggatccgagctcggtaccaagcttaagtttaaaccgctgatcagcctcgactgtgccttctagttgccagccatctgttgtttgcccctcccccgtgccttccttgaccctggaaggtgccactcccactgtcctttcctaataaaatgaggaaattgcatcgcattgtctgagtaggtgtcattctattctggggggtggggtggggcaggacagcaagggggaggattgggaagacaatagcaggcatgctggggatgcggtgggctctatggcttctgaggcggaaagaaccagctggggctctagggggtatccccacgcgccctgtagcggcgcattaagcgcggcgggtgtggtggttacgcgcagcgtgaccgctacacttgccagcgccctagcgcccgctcctttcgctttcttcccttcctttctcgccacgttcgccggctttccccgtcaagctctaaatcgggggctccctttagggttccgatttagtgctttacggcacctcgaccccaaaaaacttgattagggtgatggttcacgtagtgggccatcgccctgatagacggtttttcgccctttgacgttggagtccacgttctttaatagtggactcttgttccaaactggaacaacactcaaccctatctcggtctattcttttgatttataagggattttgccgatttcggcctattggttaaaaaatgagctgatttaacaaaaatttaacgcgaattaattctgtggaatgtgtgtcagttagggtgtggaaagtccccaggctccccagcaggcagaagtatgcaaagcatgcatctcaattagtcagcaaccaggtgtggaaagtccccaggctccccagcaggcagaagtatgcaaagcatgcatctcaattagtcagcaaccatagtcccgcccctaactccgcccatcccgcccctaactccgcccagttccgcccattctccgccccatggctgactaattttttttatttatgcagaggccgaggccgcctctgcctctgagctattccagaagtagtgaggaggcttttttggaggcctaggcttttgcaaaaagctcccgggagcttgtatatccattttcggatctgatcaagagacaggatgaggatcgtttcgcatgattgaacaagatggattgcacgcaggttctccggccgcttgggtggagaggctattcggctatgactgggcacaacagacaatcggctgctctgatgccgccgtgttccggctgtcagcgcaggggcgcccggttctttttgtcaagaccgacctgtccggtgccctgaatgaactgcaggacgaggcagcgcggctatcgtggctggccacgacgggcgttccttgcgcagctgtgctcgacgttgtcactgaagcgggaagggactggctgctattgggcgaagtgccggggcaggatctcctgtcatctcaccttgctcctgccgagaaagtatccatcatggctgatgcaatgcggcggctgcatacgcttgatccggctacctgcccattcgaccaccaagcgaaacatcgcatcgagcgagcacgtactcggatggaagccggtcttgtcgatcaggatgatctggacgaagagcatcaggggctcgcgccagccgaactgttcgccaggctcaaggcgcgcatgcccgacggcgaggatctcgtcgtgacccatggcgatgcctgcttgccgaatatcatggtggaaaatggccgcttttctggattcatcgactgtggccggctgggtgtggcggaccgctatcaggacatagcgttggctacccgtgatattgctgaagagcttggcggcgaatgggctgaccgcttcctcgtgctttacggtatcgccgctcccgattcgcagcgcatcgccttctatcgccttcttgacgagttcttctgagcgggactctggggttcgaaatgaccgaccaagcgacgcccaacctgccatcacgagatttcgattccaccgccgccttctatgaaaggttgggcttcggaatcgttttccgggacgccggctggatgatcctccagcgcggggatctcatgctggagttcttcgcccaccccaacttgtttattgcagcttataatggttacaaataaagcaatagcatcacaaatttcacaaataaagcatttttttcactgcattctagttgtggtttgtccaaactcatcaatgtatcttatcatgtctgtataccgtcgacctctagctagagcttggcgtaatcatggtcatagctgtttcctgtgtgaaattgttatccgctcacaattccacacaacatacgagccggaagcataaagtgtaaagcctggggtgcctaatgagtgagctaactcacattaattgcgttgcgctcactgcccgctttccagtcgggaaacctgtcgtgccagctgcattaatgaatcggccaacgcgcggggagaggcggtttgcgtattgggcgctcttccgcttcctcgctcactgactcgctgcgctcggtcgttcggctgcggcgagcggtatcagctcactcaaaggcggtaatacggttatccacagaatcaggggataacgcaggaaagaacatgtgagcaaaaggccagcaaaaggccaggaaccgtaaaaaggccgcgttgctggcgtttttccataggctccgcccccctgacgagcatcacaaaaatcgacgctcaagtcagaggtggcgaaacccgacaggactataaagataccaggcgtttccccctggaagctccctcgtgcgctctcctgttccgaccctgccgcttaccggatacctgtccgcctttctcccttcgggaagcgtggcgctttctcatagctcacgctgtaggtatctcagttcggtgtaggtcgttcgctccaagctgggctgtgtgcacgaaccccccgttcagcccgaccgctgcgccttatccggtaactatcgtcttgagtccaacccggtaagacacgacttatcgccactggcagcagccactggtaacaggattagcagagcgaggtatgtaggcggtgctacagagttcttgaagtggtggcctaactacggctacactagaagaacagtatttggtatctgcgctctgctgaagccagttaccttcggaaaaagagttggtagctcttgatccggcaaacaaaccaccgctggtagcggtttttttgtttgcaagcagcagattacgcgcagaaaaaaaggatctcaagaagatcctttgatcttttctacggggtctgacgctcagtggaacgaaaactcacgttaagggattttggtcatgagattatcaaaaaggatcttcacctagatccttttaaattaaaaatgaagttttaaatcaatctaaagtatatatgagtaaacttggtctgacagttaccaatgcttaatcagtgaggcacctatctcagcgatctgtctatttcgttcatccatagttgcctgactccccgtcgtgtagataactacgatacgggagggcttaccatctggccccagtgctgcaatgataccgcgagacccacgctcaccggctccagatttatcagcaataaaccagccagccggaagggccgagcgcagaagtggtcctgcaactttatccgcctccatccagtctattaattgttgccgggaagctagagtaagtagttcgccagttaatagtttgcgcaacgttgttgccattgctacaggcatcgtggtgtcacgctcgtcgtttggtatggcttcattcagctccggttcccaacgatcaaggcgagttacatgatcccccatgttgtgcaaaaaagcggttagctccttcggtcctccgatcgttgtcagaagtaagttggccgcagtgttatcactcatggttatggcagcactgcataattctcttactgtcatgccatccgtaagatgcttttctgtgactggtgagtactcaaccaagtcattctgagaatagtgtatgcggcgaccgagttgctcttgcccggcgtcaatacgggataataccgcgccacatagcagaactttaaaagtgctcatcattggaaaacgttcttcggggcgaaaactctcaaggatcttaccgctgttgagatccagttcgatgtaacccactcgtgcacccaactgatcttcagcatcttttactttcaccagcgtttctgggtgagcaaaaacaggaaggcaaaatgccgcaaaaaagggaataagggcgacacggaaatgttgaatactcatactcttcctttttcaatattattgaagcatttatcagggttattgtctcatgagcggatacatatttgaatgtatttagaaaaataaacaaataggggttccgcgcacatttccccgaaaagtgccacctgacgtc

SEQ ID NO: 281 - DNA, 6198 bp, Artificial Sequence
  Synthetic construct
gacggatcgggagatctcccgatcccctatggtgcactctcagtacaatctgctctgatgccgcatagttaagccagtatctgctccctgcttgtgtgttggaggtcgctgagtagtgcgcgagcaaaatttaagctacaacaaggcaaggcttgaccgacaattgcatgaagaatctgcttagggttaggcgttttgcgctgcttcgcgatgtacgggccagatatacgcgttgacattgattattgactagttattaatagtaatcaattacggggtcattagttcatagcccatatatggagttccgcgttacataacttacggtaaatggcccgcctggctgaccgcccaacgacccccgcccattgacgtcaataatgacgtatgttcccatagtaacgccaatagggactttccattgacgtcaatgggtggagtatttacggtaaactgcccacttggcagtacatcaagtgtatcatatgccaagtacgccccctattgacgtcaatgacggtaaatggcccgcctggcattatgcccagtacatgaccttatgggactttcctacttggcagtacatctacgtattagtcatcgctattaccatggtgatgcggttttggcagtacatcaatgggcgtggatagcggtttgactcacggggatttccaagtctccaccccattgacgtcaatgggagtttgttttggcaccaaaatcaacgggactttccaaaatgtcgtaacaactccgccccattgacgcaaatgggcggtaggcgtgtacggtgggaggtctatataagcagagctctctggctaactagagaacccactgcttactggcttatcgaaattaatacgactcactatagggagacccaagctggctagcgtttaaacgggccctctagagatatcatgccgaaaaagaaacgtaaagtggggctcgagcccggggaaaagccctacaagtgccctgagtgtgggaagtccttttcttcaagacgcacgtgccgcgctcaccagcggacacataccggggagaagccctataaatgtccagaatgtggaaagtcctttagcacgtcagggaacttagtaagacaccagcgaactcataccggggagaagccatataaatgtcccgagtgtggcaagtccttttctagatcagataatttagtaagacatcagagaacgcacaccggggaaaagccctacaagtgcccggaatgcggcaagtcttttagcaccagcggacatttagtaagacaccagagaacccacaccggggaaaaaccctataaatgccccgagtgtggtaagtcattctctcaaagcggggatttaagaagacaccagagaacccacaccggggaaaaaccgtataaatgtcctgagtgcggtaagtctttttccgactgtagagacttagcgagacaccaacgtactcataccggtggcggcagcggcggcagcgaattcgggcgcgccgacgcgctggacgatttcgatctcgacatgctgggttctgatgccctcgatgactttgacctggatatgttgggaagcgacgcattggatgactttgatctggacatgctcggctccgatgctctggacgatttcgatctcgatatgttaattaacggatccgagcagaaactcatctctgaagaagatctggaacaaaagttgatttcagaagaagatctggaacagaagctcatctctgaggaagatctgtaagcggccgcaagcttaagtttaaaccgctgatcagcctcgactgtgccttctagttgccagccatctgttgtttgcccctcccccgtgccttccttgaccctggaaggtgccactcccactgtcctttcctaataaaatgaggaaattgcatcgcattgtctgagtaggtgtcattctattctggggggtggggtggggcaggacagcaagggggaggattgggaagacaatagcaggcatgctggggatgcggtgggctctatggcttctgaggcggaaagaaccagctggggctctagggggtatccccacgcgccctgtagcggcgcattaagcgcggcgggtgtggtggttacgcgcagcgtgaccgctacacttgccagcgccctagcgcccgctcctttcgctttcttcccttcctttctcgccacgttcgccggctttccccgtcaagctctaaatcgggggctccctttagggttccgatttagtgctttacggcacctcgaccccaaaaaacttgattagggtgatggttcacgtagtgggccatcgccctgatagacggtttttcgccctttgacgttggagtccacgttctttaatagtggactcttgttccaaactggaacaacactcaaccctatctcggtctattcttttgatttataagggattttgccgatttcggcctattggttaaaaaatgagctgatttaacaaaaatttaacgcgaattaattctgtggaatgtgtgtcagttagggtgtggaaagtccccaggctccccagcaggcagaagtatgcaaagcatgcatctcaattagtcagcaaccaggtgtggaaagtccccaggctccccagcaggcagaagtatgcaaagcatgcatctcaattagtcagcaaccatagtcccgcccctaactccgcccatcccgcccctaactccgcccagttccgcccattctccgccccatggctgactaattttttttatttatgcagaggccgaggccgcctctgcctctgagctattccagaagtagtgaggaggcttttttggaggcctaggcttttgcaaaaagctcccgggagcttgtatatccattttcggatctgatcaagagacaggatgaggatcgtttcgcatgattgaacaagatggattgcacgcaggttctccggccgcttgggtggagaggctattcggctatgactgggcacaacagacaatcggctgctctgatgccgccgtgttccggctgtcagcgcaggggcgcccggttctttttgtcaagaccgacctgtccggtgccctgaatgaactgcaggacgaggcagcgcggctatcgtggctggccacgacgggcgttccttgcgcagctgtgctcgacgttgtcactgaagcgggaagggactggctgctattgggcgaagtgccggggcaggatctcctgtcatctcaccttgctcctgccgagaaagtatccatcatggctgatgcaatgcggcggctgcatacgcttgatccggctacctgcccattcgaccaccaagcgaaacatcgcatcgagcgagcacgtactcggatggaagccggtcttgtcgatcaggatgatctggacgaagagcatcaggggctcgcgccagccgaactgttcgccaggctcaaggcgcgcatgcccgacggcgaggatctcgtcgtgacccatggcgatgcctgcttgccgaatatcatggtggaaaatggccgcttttctggattcatcgactgtggccggctgggtgtggcggaccgctatcaggacatagcgttggctacccgtgatattgctgaagagcttggcggcgaatgggctgaccgcttcctcgtgctttacggtatcgccgctcccgattcgcagcgcatcgccttctatcgccttcttgacgagttcttctgagcgggactctggggttcgaaatgaccgaccaagcgacgcccaacctgccatcacgagatttcgattccaccgccgccttctatgaaaggttgggcttcggaatcgttttccgggacgccggctggatgatcctccagcgcggggatctcatgctggagttcttcgcccaccccaacttgtttattgcagcttataatggttacaaataaagcaatagcatcacaaatttcacaaataaagcatttttttcactgcattctagttgtggtttgtccaaactcatcaatgtatcttatcatgtctgtataccgtcgacctctagctagagcttggcgtaatcatggtcatagctgtttcctgtgtgaaattgttatccgctcacaattccacacaacatacgagccggaagcataaagtgtaaagcctggggtgcctaatgagtgagctaactcacattaattgcgttgcgctcactgcccgctttccagtcgggaaacctgtcgtgccagctgcattaatgaatcggccaacgcgcggggagaggcggtttgcgtattgggcgctcttccgcttcctcgctcactgactcgctgcgctcggtcgttcggctgcggcgagcggtatcagctcactcaaaggcggtaatacggttatccacagaatcaggggataacgcaggaaagaacatgtgagcaaaaggccagcaaaaggccaggaaccgtaaaaaggccgcgttgctggcgtttttccataggctccgcccccctgacgagcatcacaaaaatcgacgctcaagtcagaggtggcgaaacccgacaggactataaagataccaggcgtttccccctggaagctccctcgtgcgctctcctgttccgaccctgccgcttaccggatacctgtccgcctttctcccttcgggaagcgtggcgctttctcatagctcacgctgtaggtatctcagttcggtgtaggtcgttcgctccaagctgggctgtgtgcacgaaccccccgttcagcccgaccgctgcgccttatccggtaactatcgtcttgagtccaacccggtaagacacgacttatcgccactggcagcagccactggtaacaggattagcagagcgaggtatgtaggcggtgctacagagttcttgaagtggtggcctaactacggctacactagaagaacagtatttggtatctgcgctctgctgaagccagttaccttcggaaaaagagttggtagctcttgatccggcaaacaaaccaccgctggtagcggtttttttgtttgcaagcagcagattacgcgcagaaaaaaaggatctcaagaagatcctttgatcttttctacggggtctgacgctcagtggaacgaaaactcacgttaagggattttggtcatgagattatcaaaaaggatcttcacctagatccttttaaattaaaaatgaagttttaaatcaatctaaagtatatatgagtaaacttggtctgacagttaccaatgcttaatcagtgaggcacctatctcagcgatctgtctatttcgttcatccatagttgcctgactccccgtcgtgtagataactacgatacgggagggcttaccatctggccccagtgctgcaatgataccgcgagacccacgctcaccggctccagatttatcagcaataaaccagccagccggaagggccgagcgcagaagtggtcctgcaactttatccgcctccatccagtctattaattgttgccgggaagctagagtaagtagttcgccagttaatagtttgcgcaacgttgttgccattgctacaggcatcgtggtgtcacgctcgtcgtttggtatggcttcattcagctccggttcccaacgatcaaggcgagttacatgatcccccatgttgtgcaaaaaagcggttagctccttcggtcctccgatcgttgtcagaagtaagttggccgcagtgttatcactcatggttatggcagcactgcataattctcttactgtcatgccatccgtaagatgcttttctgtgactggtgagtactcaaccaagtcattctgagaatagtgtatgcggcgaccgagttgctcttgcccggcgtcaatacgggataataccgcgccacatagcagaactttaaaagtgctcatcattggaaaacgttcttcggggcgaaaactctcaaggatcttaccgctgttgagatccagttcgatgtaacccactcgtgcacccaactgatcttcagcatcttttactttcaccagcgtttctgggtgagcaaaaacaggaaggcaaaatgccgcaaaaaagggaataagggcgacacggaaatgttgaatactcatactcttcctttttcaatattattgaagcatttatcagggttattgtctcatgagcggatacatatttgaatgtatttagaaaaataaacaaataggggttccgcgcacatttccccgaaaagtgccacctgacgtc

SEQ ID NO: 282 - DNA, 10723 bp, Artificial Sequence
  synthetic construct
actcttcctttttcaatattattgaagcatttatcagggttattgtctcatgagcggatacatatttgaatgtatttagaaaaataaacaaataggggttccgcgcacatttccccgaaaagtgccacctaaattgtaagcgttaatattttgttaaaattcgcgttaaatttttgttaaatcagctcattttttaaccaataggccgaaatcggcaaaatcccttataaatcaaaagaatagaccgagatagggttgagtgttgttccagtttggaacaagagtccactattaaagaacgtggactccaacgtcaaagggcgaaaaaccgtctatcagggcgatggcccactacgtgaaccatcaccctaatcaagttttttggggtcgaggtgccgtaaagcactaaatcggaaccctaaagggagcccccgatttagagcttgacggggaaagccggcgaacgtggcgagaaaggaagggaagaaagcgaaaggagcgggcgctagggcgctggcaagtgtagcggtcacgctgcgcgtaaccaccacacccgccgcgcttaatgcgccgctacagggcgcgtcccattcgccattcaggctgcgcaactgttgggaagggcgatcggtgcgggcctcttcgctattacgccagctggcgaaagggggatgtgctgcaaggcgattaagttgggtaacgccagggttttcccagtcacgacgttgtaaaacgacggccagtgagcgcgcctcgttcattcacgtttttgaacccgtggaggacgggcagactcgcggtgcaaatgtgttttacagcgtgatggagcagatgaagatgctcgacacgctgcagaacacgcagctagattaaccctagaaagataatcatattgtgacgtacgttaaagataatcatgcgtaaaattgacgcatgtgttttatcggtctgtatatcgaggtttatttattaatttgaatagatattaagttttattatatttacacttacatactaataataaattcaacaaacaatttatttatgtttatttatttattaaaaaaaaacaaaaactcaaaatttcttctataaagtaacaaaacttttatgagggacagcccccccccaaagcccccagggatgtaattacgtccctcccccgctagggggcagcagcgagccgcccggggctccgctccggtccggcgctccccccgcatccccgagccggcagcgtgcggggacagcccgggcacggggaaggtggcacgggatcgctttcctctgaacgcttctcgctgctctttgagcctgcagacacctggggggatacggggaaaaggcctccaaggcctactagtaacggccgccagtgtgctggaattcgcccttggtacctgctttctctgaccagcattctctcccctgggcctgtgccgctttctgtctgcagcttgtggcctgggtcacctctacggctggcccagatccttccctgccgcctccttcaggttccgtcttcctccactccctcttccccttgctctctgctgtgttgctgcccaaggatgctctttccggagcacttccttctcggcgctgcaccacgtgatgtcctctgagcggatcctccccgtgtctgggtcctctccgggcatctctcctccctcacccaaccccatgccgtcttcactcgctgggttcccttttccttctccttctggggcctgtgccatctctcgtttcttaggatggccttctccgacggatgtctcccttgcgtcccgcctccccttcttgtaggcctgcatcatcaccgtttttctggacaaccccaaagtaccccgtctccctggctttagccacctctccatcctcttgctttctttgcctggacaccccgttctcctgtggattcgggtcacctctcactcctttcatttgggcagctcccctaccccccttacctctctagtctgtgctagctcttccagccccctgtcatggcatcttccaggggtccgagagctcagctagtcttcttcctccaacccgggcccctatgtccacttcaggacagcatgtttgctgcctccagggatcctgtgtccccgagctgggaccaccttatattcccagggccggttaatgtggctctggttctgggtacttttatctgtcccctccaccccacagtggggcacgcgttgacattgattattgactagttattaatagtaatcaattacggggtcattagttcatagcccatatatggagttccgcgttacataacttacggtaaatggcccgcctggctgaccgcccaacgacccccgcccattgacgtcaataatgacgtatgttcccatagtaacgccaatagggactttccattgacgtcaatgggtggagtatttacggtaaactgcccacttggcagtacatcaagtgtatcatatgccaagtacgccccctattgacgtcaatgacggtaaatggcccgcctggcattatgcccagtacatgaccttatgggactttcctacttggcagtacatctacgtattagtcatcgctattaccatggtgatgcggttttggcagtacatcaatgggcgtggatagcggtttgactcacggggatttccaagtctccaccccattgacgtcaatgggagtttgttttggcaccaaaatcaacgggactttccaaaatgtcgtaacaactccgccccattgacgcaaatgggcggtaggcgtgtacggtgggaggtctatataagcagagctctccctatcagtgatagagatctccctatcagtgatagagatcgtcgacgagctcgtttagtgaaccgtcagatcgcctggagacgccatccacgctgttttgacctccatagaagacaccgggaccgatccagcctccggactctagcgtttaaacgatatcatggcggcggcggttcggatgaacatccagatgctgctggaggcggccgactatctggagcggcgggagagagaagctgaacatggttatgcctccatgttaccatacccgaaaaagaaacgtaaagtggggctcgagcccggggagaagccatataaatctcccgagtccggcaagtccttttctagatcagataatttagtaagacatcagagaacgcacaccggggagaagccgtacaagagccctgaatctggtaagtcattttcgagaagtgatgaattagtaagacaccagcggactcataccggggaaaagccctacaagagcccggaaagcggcaagtcttttagcaccagcggacatttagtaagacaccagagaacccacaccggggagaagccttataagtcccctgagagcggcaaaagcttcagcgatcctggaaatttagtaagacaccaacgcacccacaccggggaaaaaccttacaagtctcctgagagcggcaagagcttctctcaatcaagttcattagtaagacaccagaggactcataccggggagaaaccatacaagtccccagagagcgggaaaaactttagtacaagcggtgagttagtaagacaccaacgaacacacaccggtggatccggcggcagcggcggcagcgtgagcaagggcgaggagctgttcaccggggtggtgcccatcctggtcgagctggacggcgacgtaaacggccacaagttcagcgtgtccggcgagggcgagggcgatgccacctacggcaagctgaccctgaagttcatctgcaccaccggcaagctgcccgtgccctggcccaccctcgtgaccaccctgacctacggcgtgcagtgcttcagccgctaccccgaccacatgaagcagcacgacttcttcaagtccgccatgcccgaaggctacgtccaggagcgcaccatcttcttcaaggacgacggcaactacaagacccgcgccgaggtgaagttcgagggcgacaccctggtgaaccgcatcgagctgaagggcatcgacttcaaggaggacggcaacatcctggggcacaagctggagtacaactacaacagccacaacgtctatatcatggccgacaagcagaagaacggcatcaaggtgaacttcaagatccgccacaacatcgaggacggcagcgtgcagctcgccgaccactaccagcagaacacccccatcggcgacggccccgtgctgctgcccgacaaccactacctgagcacccagtccgccctgagcaaagaccccaacgagaagcgcgatcacatggtcctgctggagttcgtgaccgccgccgggatcactctcggcatggacgagctgtacaagtaagcggccgcttcgaatttaaatcggatccctgtgccttctagttgccagccatctgttgtttgcccctcccccgtgccttccttgaccctggaaggtgccactcccactgtcctttcctaataaaatgaggaaattgcatcgcattgtctgagtaggtgtcattctattctggggggtggggtggggcaggacagcaagggggaggattgggaagacaatagcaggcatgctggggatgcggtgggctctatggagatctgcggccgcgaaggatctgcgatcgctccggtgcccgtcagtgggcagagcgcacatcgcccacagtccccgagaagttggggggaggggtcggcaattgaacgggtgcctagagaaggtggcgcggggtaaactgggaaagtgatgtcgtgtactggctccgcctttttcccgagggtgggggagaaccgtatataagtgcagtagtcgccgtgaacgttctttttcgcaacgggtttgccgccagaacacagctgaagcttgtgagtttggggacccttgattgttctttctttttcgctattgtaaaattcatgttatatggagggggcaaagttttcagggtgttgtttagaatgggaagatgtcccttgtatcaccatggaccctcatgataattttgtttctttcactttctactctgttgacaaccattgtctcctcttattttcttttcattttctgtaactttttcgttaaactttagcttgcatttgtaacgaatttttaaattcacttttgtttatttgtcagattgtaagtactttctctaatcacttttttttcaaggcaatcagggtatattatattgtacttcagcacagttttagagaacaattgttataattaaatgataaggtagaatatttctgcatataaattctggctggcgtggaaatattcttattggtagaaacaactacatcctggtcatcatcctgcctttctctttatggttacaatgatatacactgtttgagatgaggataaaatactctgagtccaaaccgggcccctctgctaaccatgttcatgccttcttctttttcctacagctcctgggcaacgtgctggttattgtgctgtctcatcattttggcaaagaattgtaatacgactcactatagggcgaattgatatgtctagattagataaaagtaaagtgattaacagcgcattagagctgcttaatgaggtcggaatcgaaggtttaacaacccgtaaactcgcccagaagctaggtgtagagcagcctacattgtattggcatgtaaaaaataagcgggctttgctcgacgccttagccattgagatgttagataggcaccatactcacttttgccctttagaaggggaaagctggcaagattttttacgtaataacgctaaaagttttagatgtgctttactaagtcatcgcgatggagcaaaagtacatttaggtacacggcctacagaaaaacagtatgaaactctcgaaaatcaattagcctttttatgccaacaaggtttttcactagagaatgcattatatgcactcagcgctgtggggcattttactttaggttgcgtattggaagatcaagagcatcaagtcgctaaagaagaaagggaaacacctactactgatagtatgccgccattattacgacaagctatcgaattatttgatcaccaaggtgcagagccagccttcttattcggccttgaattgatcatatgcggattagaaaaacaacttaaatgtgaaagtgggtccgcgtacagcggatcccgggaattcagatcttatgcgatcgagggcagaggaagtcttctaacatgcggtgacgtggaggagaatcccggccctatgaccgagtacaagcccacggtgcgcctcgccacccgcgacgacgtccccagggccgtacgcaccctcgccgccgcgttcgccgactaccccgccacgcgccacaccgtcgatccggaccgccacatcgagcgggtcaccgagctgcaagaactcttcctcacgcgcgtcgggctcgacatcggcaaggtgtgggtcgcggacgacggcgccgcggtggcggtctggaccacgccggagagcgtcgaagcgggggcggtgttcgccgagatcggcccgcgcatggccgagttgagcggttcccggctggccgcgcagcaacagatggaaggcctcctggcgccgcaccggcccaaggagcccgcgtggttcctggccaccgtcggcgtctcgcccgaccaccagggcaagggtctgggcagcgccgtcgtgctccccggagtggaggcggccgagcgcgccggggtgcccgccttcctggagacctccgcgccccgcaacctccccttctacgagcggctcggcttcaccgtcaccgccgacgtcgaggtgcccgaaggaccgcgcacctggtgcatgacccgcaagcccggtgcctgaaatcaacctctggattacaaaatttgtgaaagattgactggtattcttaactatgttgctccttttacgctatgtggatacgctgctttaatgcctttgtatcagttaacttgtttattgcagcttataatggttacaaataaagcaatagcatcacaaatttcacaaataaagcatttttttcactgcattctagttgtggtttgtccaaactcatcaatgtatcttatcatgtctggaattgactcaaatgatgtcaattagtctatcagaagctatctggtctcccttccgggggacaagacatccctgtttaatatttaaacagcagtgttcccaaactgggttcttatatcccttgctctggtcaaccaggttgcagggtttcctgtcctcacaggaacgaagtccctaaagaaacagtggcagccaggtttagccccggaattgactggattccttttttagggcccattggtatggtgtacactactagggacaggattggtgacagaaaagccccatccttaggcctcctccttcctagtctcctgatattgggtctaacccccacctcctgttaggcagattccttatctggtgacacacccccatttcctggagccatctctctccttgccagaacctctaaggtttgcttacgatggagccagagaggatcctgggagggagagcttggcagggggtgggagggaagggggggatgcgtgacctgcccggttctcagtggccaccctgcgctaccctctcccagaacctgagctgctctgacgcggctgtctggtgcgtttcactgatcctggtgctgcagcttccttacacttcccaagaggagaagcagtttggaaaaacaaaatcagaataagttggtcctgagttctaactttggctcttcacctttctagtccccaatttatattgttcctccgtgcgtcagttttacctgtgagataaggccagtagccagccccgtcctggcagggctgtggtgaggaggggggtgtccgtgtggaaaactccctttgtgagaatggtgcgtcctaggtgttcaccaggtcgtggccgcctctactccctttctctttctccatccttctttccttaaagagtccccagtgctatctgggacatattcctccgcccagagcagggtcccgcttccctaaggccctgctctgggcttctgggtttgagtccttggcaagcccaggagaggcgctcaggcttccctgtcccccttcctcgtccaccatctcatgcccctggctctcctgccccttccctacaggggttcctggctctgctctctcgagatgcatgcgtcaattttacgcagactatctttctagggttaatctagctgcatcaggatcatatcgtcgggtcttttttccggctcagtcatcgcccaagctggcgctatctgggcatcggggaggaagaagcccgtgccttttcccgcgaggttgaagcggcatggaaagagtttgccgaggatgactgctgctgcattgacgttgagcgaaaacgcacgtttaccatgatgattcgggaaggtgtggccatgcacgcctttaacggtgaactgttcgttcaggccacctgggataccagttcgtcgcggcttttccggacacagttccggatggtcagcccgaagcgcatcagcaacccgaacaataccggcgacagccggaactgccgtgccggtgtgcagattaatgacagcggtgcggcgctgggatattacgtcagcgaggacgggtatcctggctggatgccgcagaaatggacatggataccccgtgagttacccggcgggcgcgcttggcgtaatcatggtcatagctgtttcctgtgtgaaattgttatccgctcacaattccacacaacatacgagccggaagcataaagtgtaaagcctggggtgcctaatgagtgagctaactcacattaattgcgttgcgctcactgcccgctttccagtcgggaaacctgtcgtgccagctgcattaatgaatcggccaacgcgcggggagaggcggtttgcgtattgggcgctcttccgcttcctcgctcactgactcgctgcgctcggtcgttcggctgcggcgagcggtatcagctcactcaaaggcggtaatacggttatccacagaatcaggggataacgcaggaaagaacatgtgagcaaaaggccagcaaaaggccaggaaccgtaaaaaggccgcgttgctggcgtttttccataggctccgcccccctgacgagcatcacaaaaatcgacgctcaagtcagaggtggcgaaacccgacaggactataaagataccaggcgtttccccctggaagctccctcgtgcgctctcctgttccgaccctgccgcttaccggatacctgtccgcctttctcccttcgggaagcgtggcgctttctcatagctcacgctgtaggtatctcagttcggtgtaggtcgttcgctccaagctgggctgtgtgcacgaaccccccgttcagcccgaccgctgcgccttatccggtaactatcgtcttgagtccaacccggtaagacacgacttatcgccactggcagcagccactggtaacaggattagcagagcgaggtatgtaggcggtgctacagagttcttgaagtggtggcctaactacggctacactagaaggacagtatttggtatctgcgctctgctgaagccagttaccttcggaaaaagagttggtagctcttgatccggcaaacaaaccaccgctggtagcggtggtttttttgtttgcaagcagcagattacgcgcagaaaaaaaggatctcaagaagatcctttgatcttttctacggggtctgacgctcagtggaacgaaaactcacgttaagggattttggtcatgagattatcaaaaaggatcttcacctagatccttttaaattaaaaatgaagttttaaatcaatctaaagtatatatgagtaaacttggtctgacagttaccaatgcttaatcagtgaggcacctatctcagcgatctgtctatttcgttcatccatagttgcctgactccccgtcgtgtagataactacgatacgggagggcttaccatctggccccagtgctgcaatgataccgcgagacccacgctcaccggctccagatttatcagcaataaaccagccagccggaagggccgagcgcagaagtggtcctgcaactttatccgcctccatccagtctattaattgttgccgggaagctagagtaagtagttcgccagttaatagtttgcgcaacgttgttgccattgctacaggcatcgtggtgtcacgctcgtcgtttggtatggcttcattcagctccggttcccaacgatcaaggcgagttacatgatcccccatgttgtgcaaaaaagcggttagctccttcggtcctccgatcgttgtcagaagtaagttggccgcagtgttatcactcatggttatggcagcactgcataattctcttactgtcatgccatccgtaagatgcttttctgtgactggtgagtactcaaccaagtcattctgagaatagtgtatgcggcgaccgagttgctcttgcccggcgtcaatacgggataataccgcgccacatagcagaactttaaaagtgctcatcattggaaaacgttcttcggggcgaaaactctcaaggatcttaccgctgttgagatccagttcgatgtaacccactcgtgcacccaactgatcttcagcatcttttactttcaccagcgtttctgggtgagcaaaaacaggaaggcaaaatgccgcaaaaaagggaataagggcgacacggaaatgttgaatactcat

SEQ ID NO: 283 - DNA, 8068 bp, Artificial Sequence
  synthetic construct
  misc_feature (1062)..(1062): n is a, c, g, or t
gacggatcgggagatctcccgatcccctatggtgcactctcagtacaatctgctctgatgccgcatagttaagccagtatctgctccctgcttgtgtgttggaggtcgctgagtagtgcgcgagcaaaatttaagctacaacaaggcaaggcttgaccgacaattgcatgaagaatctgcttagggttaggcgttttgcgctgcttcgcgatgtacgggccagatatacgcgtttcgaagatatcgttgacattgattattgtctagttattaatagtaatcaattacggggtcattagttcatagcccatatatggagttccgcgttacataacttacggtaaatggcccgcctggctgaccgcccaacgacccccgcccattgacgtcaataatgacgtatgttcccatagtaacgccaatagggactttccattgacgtcaatgggtggagtatttacggtaaactgcccacttggcagtacatcaagtgtatcatatgccaagtacgccccctattgacgtcaatgacggtaaatggcccgcctggcattatgcccagtacatgaccttatgggactttcctacttggcagtacatctacgtattagtcatcgctattaccatggtgatgcggttttggcagtacatcaatgggcgtggatagcggtttgactcacggggatttccaagtctccaccccattgacgtcaatgggagtttgttttggcaccaaaatcaacgggactttccaaaatgtcgtaacaactccgccccattgacgcaaatgggcggtaggcgtgtacggtgggaggtctatataagcacttaagttaaaaaagactcctgcccttcagggcctggaagggggcggcaccggtactagtgtttagtgaaccgtcagatcgcctggagacgccatccacgctgttttgacctccatagaagacaccgggaccgatccagcctccggactctagcctcgagcccaagcttggtaccgagctcggatccagccaccatgggagtcaaagttctgtttgccctgatctgcatcgctgnggccgaggccaagcccaccgagaacaacgaagacttcaacatcgtggccgtggccagcaacttcgcgaccacggatctcgatgctgaccgcgggaagttgcccggcaagaagctgccgctggaggtgctcaaagagctggaagccaatgcccggaaagctggctgcaccaggggctgtctgatctgcctgtcccacatcaagtgcacgcccaagatgaagaagttcatcccaggacgctgccacacctacgaaggcgacaaagagtccgcacagggcggcataggcgaggcgatcgtcgacattcctgagattcctgggttcaaggacttggagcccctggagcagttcatcgcacaggtcgatctgtgtgtggactgcacaactggctgcctcaaagggcttgccaacgtgcagtgttctgacctgctcaagaagtggctgccgcaacgctgtgcgacctttgccagcaagatccagggccaggtggacaagatcaagggggccggtggtgactaagcggccgcttcgagcagacatgataagatacattgatgagtttggacaaaccacaactagaatgcagtgaaaaaaatgctttatttgtgaaatttgtgatgctattgctttatttgtaaccattataagctgcaataaacaagttaacaacaacaattgcattcattttatgtttcaggttcagggggaggtgtgggaggttttttaaagcaagtaaaacctctacaaatgtggtacaaccggtctagttattaatagtaatcaattacggggtcattagttcatagcccatatatggagttccgcgttacataacttacggtaaatggcccgcctggctgaccgcccaacgacccccgcccattgacgtcaataatgacgtatgttcccatagtaacgccaatagggactttccattgacgtcaatgggtggagtatttacggtaaactgcccacttggcagtacatcaagtgtatcatatgccaagtacgccccctattgacgtcaatgacggtaaatggcccgcctggcattatgcccagtacatgaccttatgggactttcctacttggcagtacatctacgtattagtcatcgctattaccatggtgatgcggttttggcagtacatcaatgggcgtggatagcggtttgactcacggggatttccaagtctccaccccattgacgtcaatgggagtttgttttggcaccaaaatcaacgggactttccaaaatgtcgtaacaactccgccccattgacgcaaatgggcggtaggcgtgtacggtgggaggtctatataagcagagctctctggctaactagagaacccactgcttactggcttatcgaaattttaattaacgttggcaccatgctgctgctgctgctgctgctgggcctgaggctacagctctccctgggcatcatcccagttgaggaggagaacccggacttctggaaccgcgaggcagccgaggccctgggtgccgccaagaagctgcagcctgcacagacagccgccaagaacctcatcatcttcctgggcgatgggatgggggtgtctacggtgacagctgccaggatcctaaaagggcagaagaaggacaaactggggcctgagatacccctggccatggaccgcttcccatatgtggctctgtccaagacatacaatgtagacaaacatgtgccagacagtggagccacagccacggcctacctgtgcggggtcaagggcaacttccagaccattggcttgagtgcagccgcccgctttaaccagtgcaacacgacacgcggcaacgaggtcatctccgtgatgaatcgggccaagaaagcagggaagtcagtgggagtggtaaccaccacacgagtgcagcacgcctcgccagccggcacctacgcccacacggtgaaccgcaactggtactcggacgccgacgtgcctgcctcggcccgccaggaggggtgccaggacatcgctacgcagctcatctccaacatggacattgacgtgatcctaggtggaggccgaaagtacatgtttcgcatgggaaccccagaccctgagtacccagatgactacagccaaggtgggaccaggctggacgggaagaatctggtgcaggaatggctggcgaagcgccagggtgcccggtatgtgtggaaccgcactgagctcatgcaggcttccctggacccgtctgtgacccatctcatgggtctctttgagcctggagacatgaaatacgagatccaccgagactccacactggacccctccctgatggagatgacagaggctgccctgcgcctgctgagcaggaacccccgcggcttcttcctcttcgtggagggtggtcgcatcgaccatggtcatcatgaaagcagggcttaccgggcactgactgagacgatcatgttcgacgacgccattgagagggcgggccagctcaccagcgaggaggacacgctgagcctcgtcactgccgaccactcccacgtcttctccttcggaggctaccccctgcgagggagctccatcttcgggctggcccctggcaaggcccgggacaggaaggcctacacggtcctcctatacggaaacggtccaggctatgtgctcaaggacggcgcccggccggatgttaccgagagcgagagcgggagccccgagtatcggcagcagtcagcagtgcccctggacgaagagacccacgcaggcgaggacgtggcggtgttcgcgcgcggcccgcaggcgcacctggttcacggcgtgcaggagcagaccttcatagcgcacgtcatggccttcgccgcctgcctggagccctacaccgcctgcgacctggcgccccccgccggcaccaccgacgccgcgcacccgggttactctagagtcggggcggccggctaggtttaaacccgctgatcagcctcgactgtgccttctagttgccagccatctgttgtttgcccctcccccgtgccttccttgaccctggaaggtgccactcccactgtcctttcctaataaaatgaggaaattgcatcgcattgtctgagtaggtgtcattctattctggggggtggggtggggcaggacagcaagggggaggattgggaagacaatagcaggcatgctggggatgcggtgggctctatggcttctgaggcggaaagaaccagctggggctctagggggtatccccacgcgccctgtagcggcgcattaagcgcggcgggtgtggtggttacgcgcagcgtgaccgctacacttgccagcgccctagcgcccgctcctttcgctttcttcccttcctttctcgccacgttcgccggctttccccgtcaagctctaaatcgggggctccctttagggttccgatttagtgctttacggcacctcgaccccaaaaaacttgattagggtgatggttcacgtacctagaagttcctattccgaagttcctattctctagaaagtataggaacttccttggccaaaaagcctgaactcaccgcgacgtctgtcgagaagtttctgatcgaaaagttcgacagcgtctccgacctgatgcagctctcggagggcgaagaatctcgtgctttcagcttcgatgtaggagggcgtggatatgtcctgcgggtaaatagctgcgccgatggtttctacaaagatcgttatgtttatcggcactttgcatcggccgcgctcccgattccggaagtgcttgacattggggaattcagcgagagcctgacctattgcatctcccgccgtgcacagggtgtcacgttgcaagacctgcctgaaaccgaactgcccgctgttctgcagccggtcgcggaggccatggatgcgatcgctgcggccgatcttagccagacgagcgggttcggcccattcggaccgcaaggaatcggtcaatacactacatggcgtgatttcatatgcgcgattgctgatccccatgtgtatcactggcaaactgtgatggacgacaccgtcagtgcgtccgtcgcgcaggctctcgatgagctgatgctttgggccgaggactgccccgaagtccggcacctcgtgcacgcggatttcggctccaacaatgtcctgacggacaatggccgcataacagcggtcattgactggagcgaggcgatgttcggggattcccaatacgaggtcgccaacatcttcttctggaggccgtggttggcttgtatggagcagcagacgcgctacttcgagcggaggcatccggagcttgcaggatcgccgcggctccgggcgtatatgctccgcattggtcttgaccaactctatcagagcttggttgacggcaatttcgatgatgcagcttgggcgcagggtcgatgcgacgcaatcgtccgatccggagccgggactgtcgggcgtacacaaatcgcccgcagaagcgcggccgtctggaccgatggctgtgtagaagtactcgccgatagtggaaaccgacgccccagcactcgtccgagggcaaaggaatagcacgtactacgagatttcgattccaccgccgccttctatgaaaggttgggcttcggaatcgttttccgggacgccggctggatgatcctccagcgcggggatctcatgctggagttcttcgcccaccccaacttgtttattgcagcttataatggttacaaataaagcaatagcatcacaaatttcacaaataaagcatttttttcactgcattctagttgtggtttgtccaaactcatcaatgtatcttatcatgtctgtataccgtcgacctctagctagagcttggcgtaatcatggtcatagctgtttcctgtgtgaaattgttatccgctcacaattccacacaacatacgagccggaagcataaagtgtaaagcctggggtgcctaatgagtgagctaactcacattaattgcgttgcgctcactgcccgctttccagtcgggaaacctgtcgtgccagctgcattaatgaatcggccaacgcgcggggagaggcggtttgcgtattgggcgctcttccgcttcctcgctcactgactcgctgcgctcggtcgttcggctgcggcgagcggtatcagctcactcaaaggcggtaatacggttatccacagaatcaggggataacgcaggaaagaacatgtgagcaaaaggccagcaaaaggccaggaaccgtaaaaaggccgcgttgctggcgtttttccataggctccgcccccctgacgagcatcacaaaaatcgacgctcaagtcagaggtggcgaaacccgacaggactataaagataccaggcgtttccccctggaagctccctcgtgcgctctcctgttccgaccctgccgcttaccggatacctgtccgcctttctcccttcgggaagcgtggcgctttctcatagctcacgctgtaggtatctcagttcggtgtaggtcgttcgctccaagctgggctgtgtgcacgaaccccccgttcagcccgaccgctgcgccttatccggtaactatcgtcttgagtccaacccggtaagacacgacttatcgccactggcagcagccactggtaacaggattagcagagcgaggtatgtaggcggtgctacagagttcttgaagtggtggcctaactacggctacactagaagaacagtatttggtatctgcgctctgctgaagccagttaccttcggaaaaagagttggtagctcttgatccggcaaacaaaccaccgctggtagcggtggtttttttgtttgcaagcagcagattacgcgcagaaaaaaaggatctcaagaagatcctttgatcttttctacggggtctgacgctcagtggaacgaaaactcacgttaagggattttggtcatgagattatcaaaaaggatcttcacctagatccttttaaattaaaaatgaagttttaaatcaatctaaagtatatatgagtaaacttggtctgacagttaccaatgcttaatcagtgaggcacctatctcagcgatctgtctatttcgttcatccatagttgcctgactccccgtcgtgtagataactacgatacgggagggcttaccatctggccccagtgctgcaatgataccgcgagacccacgctcaccggctccagatttatcagcaataaaccagccagccggaagggccgagcgcagaagtggtcctgcaactttatccgcctccatccagtctattaattgttgccgggaagctagagtaagtagttcgccagttaatagtttgcgcaacgttgttgccattgctacaggcatcgtggtgtcacgctcgtcgtttggtatggcttcattcagctccggttcccaacgatcaaggcgagttacatgatcccccatgttgtgcaaaaaagcggttagctccttcggtcctccgatcgttgtcagaagtaagttggccgcagtgttatcactcatggttatggcagcactgcataattctcttactgtcatgccatccgtaagatgcttttctgtgactggtgagtactcaaccaagtcattctgagaatagtgtatgcggcgaccgagttgctcttgcccggcgtcaatacgggataataccgcgccacatagcagaactttaaaagtgctcatcattggaaaacgttcttcggggcgaaaactctcaaggatcttaccgctgttgagatccagttcgatgtaacccactcgtgcacccaactgatcttcagcatcttttactttcaccagcgtttctgggtgagcaaaaacaggaaggcaaaatgccgcaaaaaagggaataagggcgacacggaaatgttgaatactcatactcttcctttttcaatattattgaagcatttatcagggttattgtctcatgagcggatacatatttgaatgtatttagaaaaataaacaaataggggttccgcgcacatttccccgaaaagtgccacctgacgtc

SEQ ID NO: 284 - DNA, 8062 bp, Artificial Sequence
  synthetic construct
  misc_feature (1056)..(1056): n is a, c, g, or t
gacggatcgggagatctcccgatcccctatggtgcactctcagtacaatctgctctgatgccgcatagttaagccagtatctgctccctgcttgtgtgttggaggtcgctgagtagtgcgcgagcaaaatttaagctacaacaaggcaaggcttgaccgacaattgcatgaagaatctgcttagggttaggcgttttgcgctgcttcgcgatgtacgggccagatatacgcgtttcgaagatatcgttgacattgattattgtctagttattaatagtaatcaattacggggtcattagttcatagcccatatatggagttccgcgttacataacttacggtaaatggcccgcctggctgaccgcccaacgacccccgcccattgacgtcaataatgacgtatgttcccatagtaacgccaatagggactttccattgacgtcaatgggtggagtatttacggtaaactgcccacttggcagtacatcaagtgtatcatatgccaagtacgccccctattgacgtcaatgacggtaaatggcccgcctggcattatgcccagtacatgaccttatgggactttcctacttggcagtacatctacgtattagtcatcgctattaccatggtgatgcggttttggcagtacatcaatgggcgtggatagcggtttgactcacggggatttccaagtctccaccccattgacgtcaatgggagtttgttttggcaccaaaatcaacgggactttccaaaatgtcgtaacaactccgccccattgacgcaaatgggcggtaggcgtgtacggtgggaggtctatataagcacttaagaaatattaaattgcccagttgggcaccatcctgaatattatcactagtgtttagtgaaccgtcagatcgcctggagacgccatccacgctgttttgacctccatagaagacaccgggaccgatccagcctccggactctagcctcgagcccaagcttggtaccgagctcggatccagccaccatgggagtcaaagttctgtttgccctgatctgcatcgctgnggccgaggccaagcccaccgagaacaacgaagacttcaacatcgtggccgtggccagcaacttcgcgaccacggatctcgatgctgaccgcgggaagttgcccggcaagaagctgccgctggaggtgctcaaagagctggaagccaatgcccggaaagctggctgcaccaggggctgtctgatctgcctgtcccacatcaagtgcacgcccaagatgaagaagttcatcccaggacgctgccacacctacgaaggcgacaaagagtccgcacagggcggcataggcgaggcgatcgtcgacattcctgagattcctgggttcaaggacttggagcccctggagcagttcatcgcacaggtcgatctgtgtgtggactgcacaactggctgcctcaaagggcttgccaacgtgcagtgttctgacctgctcaagaagtggctgccgcaacgctgtgcgacctttgccagcaagatccagggccaggtggacaagatcaagggggccggtggtgactaagcggccgcttcgagcagacatgataagatacattgatgagtttggacaaaccacaactagaatgcagtgaaaaaaatgctttatttgtgaaatttgtgatgctattgctttatttgtaaccattataagctgcaataaacaagttaacaacaacaattgcattcattttatgtttcaggttcagggggaggtgtgggaggttttttaaagcaagtaaaacctctacaaatgtggtacaaccggtctagttattaatagtaatcaattacggggtcattagttcatagcccatatatggagttccgcgttacataacttacggtaaatggcccgcctggctgaccgcccaacgacccccgcccattgacgtcaataatgacgtatgttcccatagtaacgccaatagggactttccattgacgtcaatgggtggagtatttacggtaaactgcccacttggcagtacatcaagtgtatcatatgccaagtacgccccctattgacgtcaatgacggtaaatggcccgcctggcattatgcccagtacatgaccttatgggactttcctacttggcagtacatctacgtattagtcatcgctattaccatggtgatgcggttttggcagtacatcaatgggcgtggatagcggtttgactcacggggatttccaagtctccaccccattgacgtcaatgggagtttgttttggcaccaaaatcaacgggactttccaaaatgtcgtaacaactccgccccattgacgcaaatgggcggtaggcgtgtacggtgggaggtctatataagcagagctctctggctaactagagaacccactgcttactggcttatcgaaattttaattaacgttggcaccatgctgctgctgctgctgctgctgggcctgaggctacagctctccctgggcatcatcccagttgaggaggagaacccggacttctggaaccgcgaggcagccgaggccctgggtgccgccaagaagctgcagcctgcacagacagccgccaagaacctcatcatcttcctgggcgatgggatgggggtgtctacggtgacagctgccaggatcctaaaagggcagaagaaggacaaactggggcctgagatacccctggccatggaccgcttcccatatgtggctctgtccaagacatacaatgtagacaaacatgtgccagacagtggagccacagccacggcctacctgtgcggggtcaagggcaacttccagaccattggcttgagtgcagccgcccgctttaaccagtgcaacacgacacgcggcaacgaggtcatctccgtgatgaatcgggccaagaaagcagggaagtcagtgggagtggtaaccaccacacgagtgcagcacgcctcgccagccggcacctacgcccacacggtgaaccgcaactggtactcggacgccgacgtgcctgcctcggcccgccaggaggggtgccaggacatcgctacgcagctcatctccaacatggacattgacgtgatcctaggtggaggccgaaagtacatgtttcgcatgggaaccccagaccctgagtacccagatgactacagccaaggtgggaccaggctggacgggaagaatctggtgcaggaatggctggcgaagcgccagggtgcccggtatgtgtggaaccgcactgagctcatgcaggcttccctggacccgtctgtgacccatctcatgggtctctttgagcctggagacatgaaatacgagatccaccgagactccacactggacccctccctgatggagatgacagaggctgccctgcgcctgctgagcaggaacccccgcggcttcttcctcttcgtggagggtggtcgcatcgaccatggtcatcatgaaagcagggcttaccgggcactgactgagacgatcatgttcgacgacgccattgagagggcgggccagctcaccagcgaggaggacacgctgagcctcgtcactgccgaccactcccacgtcttctccttcggaggctaccccctgcgagggagctccatcttcgggctggcccctggcaaggcccgggacaggaaggcctacacggtcctcctatacggaaacggtccaggctatgtgctcaaggacggcgcccggccggatgttaccgagagcgagagcgggagccccgagtatcggcagcagtcagcagtgcccctggacgaagagacccacgcaggcgaggacgtggcggtgttcgcgcgcggcccgcaggcgcacctggttcacggcgtgcaggagcagaccttcatagcgcacgtcatggccttcgccgcctgcctggagccctacaccgcctgcgacctggcgccccccgccggcaccaccgacgccgcgcacccgggttactctagagtcggggcggccggctaggtttaaacccgctgatcagcctcgactgtgccttctagttgccagccatctgttgtttgcccctcccccgtgccttccttgaccctggaaggtgccactcccactgtcctttcctaataaaatgaggaaattgcatcgcattgtctgagtaggtgtcattctattctggggggtggggtggggcaggacagcaagggggaggattgggaagacaatagcaggcatgctggggatgcggtgggctctatggcttctgaggcggaaagaaccagctggggctctagggggtatccccacgcgccctgtagcggcgcattaagcgcggcgggtgtggtggttacgcgcagcgtgaccgctacacttgccagcgccctagcgcccgctcctttcgctttcttcccttcctttctcgccacgttcgccggctttccccgtcaagctctaaatcgggggctccctttagggttccgatttagtgctttacggcacctcgaccccaaaaaacttgattagggtgatggttcacgtacctagaagttcctattccgaagttcctattctctagaaagtataggaacttccttggccaaaaagcctgaactcaccgcgacgtctgtcgagaagtttctgatcgaaaagttcgacagcgtctccgacctgatgcagctctcggagggcgaagaatctcgtgctttcagcttcgatgtaggagggcgtggatatgtcctgcgggtaaatagctgcgccgatggtttctacaaagatcgttatgtttatcggcactttgcatcggccgcgctcccgattccggaagtgcttgacattggggaattcagcgagagcctgacctattgcatctcccgccgtgcacagggtgtcacgttgcaagacctgcctgaaaccgaactgcccgctgttctgcagccggtcgcggaggccatggatgcgatcgctgcggccgatcttagccagacgagcgggttcggcccattcggaccgcaaggaatcggtcaatacactacatggcgtgatttcatatgcgcgattgctgatccccatgtgtatcactggcaaactgtgatggacgacaccgtcagtgcgtccgtcgcgcaggctctcgatgagctgatgctttgggccgaggactgccccgaagtccggcacctcgtgcacgcggatttcggctccaacaatgtcctgacggacaatggccgcataacagcggtcattgactggagcgaggcgatgttcggggattcccaatacgaggtcgccaacatcttcttctggaggccgtggttggcttgtatggagcagcagacgcgctacttcgagcggaggcatccggagcttgcaggatcgccgcggctccgggcgtatatgctccgcattggtcttgaccaactctatcagagcttggttgacggcaatttcgatgatgcagcttgggcgcagggtcgatgcgacgcaatcgtccgatccggagccgggactgtcgggcgtacacaaatcgcccgcagaagcgcggccgtctggaccgatggctgtgtagaagtactcgccgatagtggaaaccgacgccccagcactcgtccgagggcaaaggaatagcacgtactacgagatttcgattccaccgccgccttctatgaaaggttgggcttcggaatcgttttccgggacgccggctggatgatcctccagcgcggggatctcatgctggagttcttcgcccaccccaacttgtttattgcagcttataatggttacaaataaagcaatagcatcacaaatttcacaaataaagcatttttttcactgcattctagttgtggtttgtccaaactcatcaatgtatcttatcatgtctgtataccgtcgacctctagctagagcttggcgtaatcatggtcatagctgtttcctgtgtgaaattgttatccgctcacaattccacacaacatacgagccggaagcataaagtgtaaagcctggggtgcctaatgagtgagctaactcacattaattgcgttgcgctcactgcccgctttccagtcgggaaacctgtcgtgccagctgcattaatgaatcggccaacgcgcggggagaggcggtttgcgtattgggcgctcttccgcttcctcgctcactgactcgctgcgctcggtcgttcggctgcggcgagcggtatcagctcactcaaaggcggtaatacggttatccacagaatcaggggataacgcaggaaagaacatgtgagcaaaaggccagcaaaaggccaggaaccgtaaaaaggccgcgttgctggcgtttttccataggctccgcccccctgacgagcatcacaaaaatcgacgctcaagtcagaggtggcgaaacccgacaggactataaagataccaggcgtttccccctggaagctccctcgtgcgctctcctgttccgaccctgccgcttaccggatacctgtccgcctttctcccttcgggaagcgtggcgctttctcatagctcacgctgtaggtatctcagttcggtgtaggtcgttcgctccaagctgggctgtgtgcacgaaccccccgttcagcccgaccgctgcgccttatccggtaactatcgtcttgagtccaacccggtaagacacgacttatcgccactggcagcagccactggtaacaggattagcagagcgaggtatgtaggcggtgctacagagttcttgaagtggtggcctaactacggctacactagaagaacagtatttggtatctgcgctctgctgaagccagttaccttcggaaaaagagttggtagctcttgatccggcaaacaaaccaccgctggtagcggtggtttttttgtttgcaagcagcagattacgcgcagaaaaaaaggatctcaagaagatcctttgatcttttctacggggtctgacgctcagtggaacgaaaactcacgttaagggattttggtcatgagattatcaaaaaggatcttcacctagatccttttaaattaaaaatgaagttttaaatcaatctaaagtatatatgagtaaacttggtctgacagttaccaatgcttaatcagtgaggcacctatctcagcgatctgtctatttcgttcatccatagttgcctgactccccgtcgtgtagataactacgatacgggagggcttaccatctggccccagtgctgcaatgataccgcgagacccacgctcaccggctccagatttatcagcaataaaccagccagccggaagggccgagcgcagaagtggtcctgcaactttatccgcctccatccagtctattaattgttgccgggaagctagagtaagtagttcgccagttaatagtttgcgcaacgttgttgccattgctacaggcatcgtggtgtcacgctcgtcgtttggtatggcttcattcagctccggttcccaacgatcaaggcgagttacatgatcccccatgttgtgcaaaaaagcggttagctccttcggtcctccgatcgttgtcagaagtaagttggccgcagtgttatcactcatggttatggcagcactgcataattctcttactgtcatgccatccgtaagatgcttttctgtgactggtgagtactcaaccaagtcattctgagaatagtgtatgcggcgaccgagttgctcttgcccggcgtcaatacgggataataccgcgccacatagcagaactttaaaagtgctcatcattggaaaacgttcttcggggcgaaaactctcaaggatcttaccgctgttgagatccagttcgatgtaacccactcgtgcacccaactgatcttcagcatcttttactttcaccagcgtttctgggtgagcaaaaacaggaaggcaaaatgccgcaaaaaagggaataagggcgacacggaaatgttgaatactcatactcttcctttttcaatattattgaagcatttatcagggttattgtctcatgagcggatacatatttgaatgtatttagaaaaataaacaaataggggttccgcgcacatttccccgaaaagtgccacctgacgtc

SEQ ID NO: 285 - DNA, 8068 bp, Artificial Sequence
  synthetic construct
  misc_feature (1062)..(1062): n is a, c, g, or t
gacggatcgggagatctcccgatcccctatggtgcactctcagtacaatctgctctgatgccgcatagttaagccagtatctgctccctgcttgtgtgttggaggtcgctgagtagtgcgcgagcaaaatttaagctacaacaaggcaaggcttgaccgacaattgcatgaagaatctgcttagggttaggcgttttgcgctgcttcgcgatgtacgggccagatatacgcgtttcgaagatatcgttgacattgattattgtctagttattaatagtaatcaattacggggtcattagttcatagcccatatatggagttccgcgttacataacttacggtaaatggcccgcctggctgaccgcccaacgacccccgcccattgacgtcaataatgacgtatgttcccatagtaacgccaatagggactttccattgacgtcaatgggtggagtatttacggtaaactgcccacttggcagtacatcaagtgtatcatatgccaagtacgccccctattgacgtcaatgacggtaaatggcccgcctggcattatgcccagtacatgaccttatgggactttcctacttggcagtacatctacgtattagtcatcgctattaccatggtgatgcggttttggcagtacatcaatgggcgtggatagcggtttgactcacggggatttccaagtctccaccccattgacgtcaatgggagtttgttttggcaccaaaatcaacgggactttccaaaatgtcgtaacaactccgccccattgacgcaaatgggcggtaggcgtgtacggtgggaggtctatataagcacttaagataaaagccaactagcttcctcttgctgtttctttagccactaccggtactagtgtttagtgaaccgtcagatcgcctggagacgccatccacgctgttttgacctccatagaagacaccgggaccgatccagcctccggactctagcctcgagcccaagcttggtaccgagctcggatccagccaccatgggagtcaaagttctgtttgccctgatctgcatcgctgnggccgaggccaagcccaccgagaacaacgaagacttcaacatcgtggccgtggccagcaacttcgcgaccacggatctcgatgctgaccgcgggaagttgcccggcaagaagctgccgctggaggtgctcaaagagctggaagccaatgcccggaaagctggctgcaccaggggctgtctgatctgcctgtcccacatcaagtgcacgcccaagatgaagaagttcatcccaggacgctgccacacctacgaaggcgacaaagagtccgcacagggcggcataggcgaggcgatcgtcgacattcctgagattcctgggttcaaggacttggagcccctggagcagttcatcgcacaggtcgatctgtgtgtggactgcacaactggctgcctcaaagggcttgccaacgtgcagtgttctgacctgctcaagaagtggctgccgcaacgctgtgcgacctttgccagcaagatccagggccaggtggacaagatcaagggggccggtggtgactaagcggccgcttcgagcagacatgataagatacattgatgagtttggacaaaccacaactagaatgcagtgaaaaaaatgctttatttgtgaaatttgtgatgctattgctttatttgtaaccattataagctgcaataaacaagttaacaacaacaattgcattcattttatgtttcaggttcagggggaggtgtgggaggttttttaaagcaagtaaaacctctacaaatgtggtacaaccggtctagttattaatagtaatcaattacggggtcattagttcatagcccatatatggagttccgcgttacataacttacggtaaatggcccgcctggctgaccgcccaacgacccccgcccattgacgtcaataatgacgtatgttcccatagtaacgccaatagggactttccattgacgtcaatgggtggagtatttacggtaaactgcccacttggcagtacatcaagtgtatcatatgccaagtacgccccctattgacgtcaatgacggtaaatggcccgcctggcattatgcccagtacatgaccttatgggactttcctacttggcagtacatctacgtattagtcatcgctattaccatggtgatgcggttttggcagtacatcaatgggcgtggatagcggtttgactcacggggatttccaagtctccaccccattgacgtcaatgggagtttgttttggcaccaaaatcaacgggactttccaaaatgtcgtaacaactccgccccattgacgcaaatgggcggtaggcgtgtacggtgggaggtctatataagcagagctctctggctaactagagaacccactgcttactggcttatcgaaattttaattaacgttggcaccatgctgctgctgctgctgctgctgggcctgaggctacagctctccctgggcatcatcccagttgaggaggagaacccggacttctggaaccgcgaggcagccgaggccctgggtgccgccaagaagctgcagcctgcacagacagccgccaagaacctcatcatcttcctgggcgatgggatgggggtgtctacggtgacagctgccaggatcctaaaagggcagaagaaggacaaactggggcctgagatacccctggccatggaccgcttcccatatgtggctctgtccaagacatacaatgtagacaaacatgtgccagacagtggagccacagccacggcctacctgtgcggggtcaagggcaacttccagaccattggcttgagtgcagccgcccgctttaaccagtgcaacacgacacgcggcaacgaggtcatctccgtgatgaatcgggccaagaaagcagggaagtcagtgggagtggtaaccaccacacgagtgcagcacgcctcgccagccggcacctacgcccacacggtgaaccgcaactggtactcggacgccgacgtgcctgcctcggcccgccaggaggggtgccaggacatcgctacgcagctcatctccaacatggacattgacgtgatcctaggtggaggccgaaagtacatgtttcgcatgggaaccccagaccctgagtacccagatgactacagccaaggtgggaccaggctggacgggaagaatctggtgcaggaatggctggcgaagcgccagggtgcccggtatgtgtggaaccgcactgagctcatgcaggcttccctggacccgtctgtgacccatctcatgggtctctttgagcctggagacatgaaatacgagatccaccgagactccacactggacccctccctgatggagatgacagaggctgccctgcgcctgctgagcaggaacccccgcggcttcttcctcttcgtggagggtggtcgcatcgaccatggtcatcatgaaagcagggcttaccgggcactgactgagacgatcatgttcgacgacgccattgagagggcgggccagctcaccagcgaggaggacacgctgagcctcgtcactgccgaccactcccacgtcttctccttcggaggctaccccctgcgagggagctccatcttcgggctggcccctggcaaggcccgggacaggaaggcctacacggtcctcctatacggaaacggtccaggctatgtgctcaaggacggcgcccggccggatgttaccgagagcgagagcgggagccccgagtatcggcagcagtcagcagtgcccctggacgaagagacccacgcaggcgaggacgtggcggtgttcgcgcgcggcccgcaggcgcacctggttcacggcgtgcaggagcagaccttcatagcgcacgtcatggccttcgccgcctgcctggagccctacaccgcctgcgacctggcgccccccgccggcaccaccgacgccgcgcacccgggttactctagagtcggggcggccggctaggtttaaacccgctgatcagcctcgactgtgccttctagttgccagccatctgttgtttgcccctcccccgtgccttccttgaccctggaaggtgccactcccactgtcctttcctaataaaatgaggaaattgcatcgcattgtctgagtaggtgtcattctattctggggggtggggtggggcaggacagcaagggggaggattgggaagacaatagcaggcatgctggggatgcggtgggctctatggcttctgaggcggaaagaaccagctggggctctagggggtatccccacgcgccctgtagcggcgcattaagcgcggcgggtgtggtggttacgcgcagcgtgaccgctacacttgccagcgccctagcgcccgctcctttcgctttcttcccttcctttctcgccacgttcgccggctttccccgtcaagctctaaatcgggggctccctttagggttccgatttagtgctttacggcacctcgaccccaaaaaacttgattagggtgatggttcacgtacctagaagttcctattccgaagttcctattctctagaaagtataggaacttccttggccaaaaagcctgaactcaccgcgacgtctgtcgagaagtttctgatcgaaaagttcgacagcgtctccgacctgatgcagctctcggagggcgaagaatctcgtgctttcagcttcgatgtaggagggcgtggatatgtcctgcgggtaaatagctgcgccgatggtttctacaaagatcgttatgtttatcggcactttgcatcggccgcgctcccgattccggaagtgcttgacattggggaattcagcgagagcctgacctattgcatctcccgccgtgcacagggtgtcacgttgcaagacctgcctgaaaccgaactgcccgctgttctgcagccggtcgcggaggccatggatgcgatcgctgcggccgatcttagccagacgagcgggttcggcccattcggaccgcaaggaatcggtcaatacactacatggcgtgatttcatatgcgcgattgctgatccccatgtgtatcactggcaaactgtgatggacgacaccgtcagtgcgtccgtcgcgcaggctctcgatgagctgatgctttgggccgaggactgccccgaagtccggcacctcgtgcacgcggatttcggctccaacaatgtcctgacggacaatggccgcataacagcggtcattgactggagcgaggcgatgttcggggattcccaatacgaggtcgccaacatcttcttctggaggccgtggttggcttgtatggagcagcagacgcgctacttcgagcggaggcatccggagcttgcaggatcgccgcggctccgggcgtatatgctccgcattggtcttgaccaactctatcagagcttggttgacggcaatttcgatgatgcagcttgggcgcagggtcgatgcgacgcaatcgtccgatccggagccgggactgtcgggcgtacacaaatcgcccgcagaagcgcggccgtctggaccgatggctgtgtagaagtactcgccgatagtggaaaccgacgccccagcactcgtccgagggcaaaggaatagcacgtactacgagatttcgattccaccgccgccttctatgaaaggttgggcttcggaatcgttttccgggacgccggctggatgatcctccagcgcggggatctcatgctggagttcttcgcccaccccaacttgtttattgcagcttataatggttacaaataaagcaatagcatcacaaatttcacaaataaagcatttttttcactgcattctagttgtggtttgtccaaactcatcaatgtatcttatcatgtctgtataccgtcgacctctagctagagcttggcgtaatcatggtcatagctgtttcctgtgtgaaattgttatccgctcacaattccacacaacatacgagccggaagcataaagtgtaaagcctggggtgcctaatgagtgagctaactcacattaattgcgttgcgctcactgcccgctttccagtcgggaaacctgtcgtgccagctgcattaatgaatcggccaacgcgcggggagaggcggtttgcgtattgggcgctcttccgcttcctcgctcactgactcgctgcgctcggtcgttcggctgcggcgagcggtatcagctcactcaaaggcggtaatacggttatccacagaatcaggggataacgcaggaaagaacatgtgagcaaaaggccagcaaaaggccaggaaccgtaaaaaggccgcgttgctggcgtttttccataggctccgcccccctgacgagcatcacaaaaatcgacgctcaagtcagaggtggcgaaacccgacaggactataaagataccaggcgtttccccctggaagctccctcgtgcgctctcctgttccgaccctgccgcttaccggatacctgtccgcctttctcccttcgggaagcgtggcgctttctcatagctcacgctgtaggtatctcagttcggtgtaggtcgttcgctccaagctgggctgtgtgcacgaaccccccgttcagcccgaccgctgcgccttatccggtaactatcgtcttgagtccaacccggtaagacacgacttatcgccactggcagcagccactggtaacaggattagcagagcgaggtatgtaggcggtgctacagagttcttgaagtggtggcctaactacggctacactagaagaacagtatttggtatctgcgctctgctgaagccagttaccttcggaaaaagagttggtagctcttgatccggcaaacaaaccaccgctggtagcggtggtttttttgtttgcaagcagcagattacgcgcagaaaaaaaggatctcaagaagatcctttgatcttttctacggggtctgacgctcagtggaacgaaaactcacgttaagggattttggtcatgagattatcaaaaaggatcttcacctagatccttttaaattaaaaatgaagttttaaatcaatctaaagtatatatgagtaaacttggtctgacagttaccaatgcttaatcagtgaggcacctatctcagcgatctgtctatttcgttcatccatagttgcctgactccccgtcgtgtagataactacgatacgggagggcttaccatctggccccagtgctgcaatgataccgcgagacccacgctcaccggctccagatttatcagcaataaaccagccagccggaagggccgagcgcagaagtggtcctgcaactttatccgcctccatccagtctattaattgttgccgggaagctagagtaagtagttcgccagttaatagtttgcgcaacgttgttgccattgctacaggcatcgtggtgtcacgctcgtcgtttggtatggcttcattcagctccggttcccaacgatcaaggcgagttacatgatcccccatgttgtgcaaaaaagcggttagctccttcggtcctccgatcgttgtcagaagtaagttggccgcagtgttatcactcatggttatggcagcactgcataattctcttactgtcatgccatccgtaagatgcttttctgtgactggtgagtactcaaccaagtcattctgagaatagtgtatgcggcgaccgagttgctcttgcccggcgtcaatacgggataataccgcgccacatagcagaactttaaaagtgctcatcattggaaaacgttcttcggggcgaaaactctcaaggatcttaccgctgttgagatccagttcgatgtaacccactcgtgcacccaactgatcttcagcatcttttactttcaccagcgtttctgggtgagcaaaaacaggaaggcaaaatgccgcaaaaaagggaataagggcgacacggaaatgttgaatactcatactcttcctttttcaatattattgaagcatttatcagggttattgtctcatgagcggatacatatttgaatgtatttagaaaaataaacaaataggggttccgcgcacatttccccgaaaagtgccacctgacgtc

SEQ ID NO: 286 - DNA, 8068 bp, Artificial Sequence
  synthetic construct
  misc_feature (1062)..(1062): n is a, c, g, or t
gacggatcgggagatctcccgatcccctatggtgcactctcagtacaatctgctctgatgccgcatagttaagccagtatctgctccctgcttgtgtgttggaggtcgctgagtagtgcgcgagcaaaatttaagctacaacaaggcaaggcttgaccgacaattgcatgaagaatctgcttagggttaggcgttttgcgctgcttcgcgatgtacgggccagatatacgcgtttcgaagatatcgttgacattgattattgtctagttattaatagtaatcaattacggggtcattagttcatagcccatatatggagttccgcgttacataacttacggtaaatggcccgcctggctgaccgcccaacgacccccgcccattgacgtcaataatgacgtatgttcccatagtaacgccaatagggactttccattgacgtcaatgggtggagtatttacggtaaactgcccacttggcagtacatcaagtgtatcatatgccaagtacgccccctattgacgtcaatgacggtaaatggcccgcctggcattatgcccagtacatgaccttatgggactttcctacttggcagtacatctacgtattagtcatcgctattaccatggtgatgcggttttggcagtacatcaatgggcgtggatagcggtttgactcacggggatttccaagtctccaccccattgacgtcaatgggagtttgttttggcaccaaaatcaacgggactttccaaaatgtcgtaacaactccgccccattgacgcaaatgggcggtaggcgtgtacggtgggaggtctatataagcacttaagttagaagaaaagagcgtcgaacggccacagcctttttccgaaaccggtactagtgtttagtgaaccgtcagatcgcctggagacgccatccacgctgttttgacctccatagaagacaccgggaccgatccagcctccggactctagcctcgagcccaagcttggtaccgagctcggatccagccaccatgggagtcaaagttctgtttgccctgatctgcatcgctgnggccgaggccaagcccaccgagaacaacgaagacttcaacatcgtggccgtggccagcaacttcgcgaccacggatctcgatgctgaccgcgggaagttgcccggcaagaagctgccgctggaggtgctcaaagagctggaagccaatgcccggaaagctggctgcaccaggggctgtctgatctgcctgtcccacatcaagtgcacgcccaagatgaagaagttcatcccaggacgctgccacacctacgaaggcgacaaagagtccgcacagggcggcataggcgaggcgatcgtcgacattcctgagattcctgggttcaaggacttggagcccctggagcagttcatcgcacaggtcgatctgtgtgtggactgcacaactggctgcctcaaagggcttgccaacgtgcagtgttctgacctgctcaagaagtggctgccgcaacgctgtgcgacctttgccagcaagatccagggccaggtggacaagatcaagggggccggtggtgactaagcggccgcttcgagcagacatgataagatacattgatgagtttggacaaaccacaactagaatgcagtgaaaaaaatgctttatttgtgaaatttgtgatgctattgctttatttgtaaccattataagctgcaataaacaagttaacaacaacaattgcattcattttatgtttcaggttcagggggaggtgtgggaggttttttaaagcaagtaaaacctctacaaatgtggtacaaccggtctagttattaatagtaatcaattacggggtcattagttcatagcccatatatggagttccgcgttacataacttacggtaaatggcccgcctggctgaccgcccaacgacccccgcccattgacgtcaataatgacgtatgttcccatagtaacgccaatagggactttccattgacgtcaatgggtggagtatttacggtaaactgcccacttggcagtacatcaagtgtatcatatgccaagtacgccccctattgacgtcaatgacggtaaatggcccgcctggcattatgcccagtacatgaccttatgggactttcctacttggcagtacatctacgtattagtcatcgctattaccatggtgatgcggttttggcagtacatcaatgggcgtggatagcggtttgactcacggggatttccaagtctccaccccattgacgtcaatgggagtttgttttggcaccaaaatcaacgggactttccaaaatgtcgtaacaactccgccccattgacgcaaatgggcggtaggcgtgtacggtgggaggtctatataagcagagctctctggctaactagagaacccactgcttactggcttatcgaaattttaattaacgttggcaccatgctgctgctgctgctgctgctgggcctgaggctacagctctccctgggcatcatcccagttgaggaggagaacccggacttctggaaccgcgaggcagccgaggccctgggtgccgccaagaagctgcagcctgcacagacagccgccaagaacctcatcatcttcctgggcgatgggatgggggtgtctacggtgacagctgccaggatcctaaaagggcagaagaaggacaaactggggcctgagatacccctggccatggaccgcttcccatatgtggctctgtccaagacatacaatgtagacaaacatgtgccagacagtggagccacagccacggcctacctgtgcggggtcaagggcaacttccagaccattggcttgagtgcagccgcccgctttaaccagtgcaacacgacacgcggcaacgaggtcatctccgtgatgaatcgggccaagaaagcagggaagtcagtgggagtggtaaccaccacacgagtgcagcacgcctcgccagccggcacctacgcccacacggtgaaccgcaactggtactcggacgccgacgtgcctgcctcggcccgccaggaggggtgccaggacatcgctacgcagctcatctccaacatggacattgacgtgatcctaggtggaggccgaaagtacatgtttcgcatgggaaccccagaccctgagtacccagatgactacagccaaggtgggaccaggctggacgggaagaatctggtgcaggaatggctggcgaagcgccagggtgcccggtatgtgtggaaccgcactgagctcatgcaggcttccctggacccgtctgtgacccatctcatgggtctctttgagcctggagacatgaaatacgagatccaccgagactccacactggacccctccctgatggagatgacagaggctgccctgcgcctgctgagcaggaacccccgcggcttcttcctcttcgtggagggtggtcgcatcgaccatggtcatcatgaaagcagggcttaccgggcactgactgagacgatcatgttcgacgacgccattgagagggcgggccagctcaccagcgaggaggacacgctgagcctcgtcactgccgaccactcccacgtcttctccttcggaggctaccccctgcgagggagctccatcttcgggctggcccctggcaaggcccgggacaggaaggcctacacggtcctcctatacggaaacggtccaggctatgtgctcaaggacggcgcccggccggatgttaccgagagcgagagcgggagccccgagtatcggcagcagtcagcagtgcccctggacgaagagacccacgcaggcgaggacgtggcggtgttcgcgcgcggcccgcaggcgcacctggttcacggcgtgcaggagcagaccttcatagcgcacgtcatggccttcgccgcctgcctggagccctacaccgcctgcgacctggcgccccccgccggcaccaccgacgccgcgcacccgggttactctagagtcggggcggccggctaggtttaaacccgctgatcagcctcgactgtgccttctagttgccagccatctgttgtttgcccctcccccgtgccttccttgaccctggaaggtgccactcccactgtcctttcctaataaaatgaggaaattgcatcgcattgtctgagtaggtgtcattctattctggggggtggggtggggcaggacagcaagggggaggattgggaagacaatagcaggcatgctggggatgcggtgggctctatggcttctgaggcggaaagaaccagctggggctctagggggtatccccacgcgccctgtagcggcgcattaagcgcggcgggtgtggtggttacgcgcagcgtgaccgctacacttgccagcgccctagcgcccgctcctttcgctttcttcccttcctttctcgccacgttcgccggctttccccgtcaagctctaaatcgggggctccctttagggttccgatttagtgctttacggcacctcgaccccaaaaaacttgattagggtgatggttcacgtacctagaagttcctattccgaagttcctattctctagaaagtataggaacttccttggccaaaaagcctgaactcaccgcgacgtctgtcgagaagtttctgatcgaaaagttcgacagcgtctccgacctgatgcagctctcggagggcgaagaatctcgtgctttcagcttcgatgtaggagggcgtggatatgtcctgcgggtaaatagctgcgccgatggtttctacaaagatcgttatgtttatcggcactttgcatcggccgcgctcccgattccggaagtgcttgacattggggaattcagcgagagcctgacctattgcatctcccgccgtgcacagggtgtcacgttgcaagacctgcctgaaaccgaactgcccgctgttctgcagccggtcgcggaggccatggatgcgatcgctgcggccgatcttagccagacgagcgggttcggcccattcggaccgcaaggaatcggtcaatacactacatggcgtgatttcatatgcgcgattgctgatccccatgtgtatcactggcaaactgtgatggacgacaccgtcagtgcgtccgtcgcgcaggctctcgatgagctgatgctttgggccgaggactgccccgaagtccggcacctcgtgcacgcggatttcggctccaacaatgtcctgacggacaatggccgcataacagcggtcattgactggagcgaggcgatgttcggggattcccaatacgaggtcgccaacatcttcttctggaggccgtggttggcttgtatggagcagcagacgcgctacttcgagcggaggcatccggagcttgcaggatcgccgcggctccgggcgtatatgctccgcattggtcttgaccaactctatcagagcttggttgacggcaatttcgatgatgcagcttgggcgcagggtcgatgcgacgcaatcgtccgatccggagccgggactgtcgggcgtacacaaatcgcccgcagaagcgcggccgtctggaccgatggctgtgtagaagtactcgccgatagtggaaaccgacgccccagcactcgtccgagggcaaaggaatagcacgtactacgagatttcgattccaccgccgccttctatgaaaggttgggcttcggaatcgttttccgggacgccggctggatgatcctccagcgcggggatctcatgctggagttcttcgcccaccccaacttgtttattgcagcttataatggttacaaataaagcaatagcatcacaaatttcacaaataaagcatttttttcactgcattctagttgtggtttgtccaaactcatcaatgtatcttatcatgtctgtataccgtcgacctctagctagagcttggcgtaatcatggtcatagctgtttcctgtgtgaaattgttatccgctcacaattccacacaacatacgagccggaagcataaagtgtaaagcctggggtgcctaatgagtgagctaactcacattaattgcgttgcgctcactgcccgctttccagtcgggaaacctgtcgtgccagctgcattaatgaatcggccaacgcgcggggagaggcggtttgcgtattgggcgctcttccgcttcctcgctcactgactcgctgcgctcggtcgttcggctgcggcgagcggtatcagctcactcaaaggcggtaatacggttatccacagaatcaggggataacgcaggaaagaacatgtgagcaaaaggccagcaaaaggccaggaaccgtaaaaaggccgcgttgctggcgtttttccataggctccgcccccctgacgagcatcacaaaaatcgacgctcaagtcagaggtggcgaaacccgacaggactataaagataccaggcgtttccccctggaagctccctcgtgcgctctcctgttccgaccctgccgcttaccggatacctgtccgcctttctcccttcgggaagcgtggcgctttctcatagctcacgctgtaggtatctcagttcggtgtaggtcgttcgctccaagctgggctgtgtgcacgaaccccccgttcagcccgaccgctgcgccttatccggtaactatcgtcttgagtccaacccggtaagacacgacttatcgccactggcagcagccactggtaacaggattagcagagcgaggtatgtaggcggtgctacagagttcttgaagtggtggcctaactacggctacactagaagaacagtatttggtatctgcgctctgctgaagccagttaccttcggaaaaagagttggtagctcttgatccggcaaacaaaccaccgctggtagcggtggtttttttgtttgcaagcagcagattacgcgcagaaaaaaaggatctcaagaagatcctttgatcttttctacggggtctgacgctcagtggaacgaaaactcacgttaagggattttggtcatgagattatcaaaaaggatcttcacctagatccttttaaattaaaaatgaagttttaaatcaatctaaagtatatatgagtaaacttggtctgacagttaccaatgcttaatcagtgaggcacctatctcagcgatctgtctatttcgttcatccatagttgcctgactccccgtcgtgtagataactacgatacgggagggcttaccatctggccccagtgctgcaatgataccgcgagacccacgctcaccggctccagatttatcagcaataaaccagccagccggaagggccgagcgcagaagtggtcctgcaactttatccgcctccatccagtctattaattgttgccgggaagctagagtaagtagttcgccagttaatagtttgcgcaacgttgttgccattgctacaggcatcgtggtgtcacgctcgtcgtttggtatggcttcattcagctccggttcccaacgatcaaggcgagttacatgatcccccatgttgtgcaaaaaagcggttagctccttcggtcctccgatcgttgtcagaagtaagttggccgcagtgttatcactcatggttatggcagcactgcataattctcttactgtcatgccatccgtaagatgcttttctgtgactggtgagtactcaaccaagtcattctgagaatagtgtatgcggcgaccgagttgctcttgcccggcgtcaatacgggataataccgcgccacatagcagaactttaaaagtgctcatcattggaaaacgttcttcggggcgaaaactctcaaggatcttaccgctgttgagatccagttcgatgtaacccactcgtgcacccaactgatcttcagcatcttttactttcaccagcgtttctgggtgagcaaaaacaggaaggcaaaatgccgcaaaaaagggaataagggcgacacggaaatgttgaatactcatactcttcctttttcaatattattgaagcatttatcagggttattgtctcatgagcggatacatatttgaatgtatttagaaaaataaacaaataggggttccgcgcacatttccccgaaaagtgccacctgacgtc

SEQ ID NO: 287 - DNA, 8068 bp, Artificial Sequence
  synthetic construct
  misc_feature (1062)..(1062): n is a, c, g, or t
gacggatcgggagatctcccgatcccctatggtgcactctcagtacaatctgctctgatgccgcatagttaagccagtatctgctccctgcttgtgtgttggaggtcgctgagtagtgcgcgagcaaaatttaagctacaacaaggcaaggcttgaccgacaattgcatgaagaatctgcttagggttaggcgttttgcgctgcttcgcgatgtacgggccagatatacgcgtttcgaagatatcgttgacattgattattgtctagttattaatagtaatcaattacggggtcattagttcatagcccatatatggagttccgcgttacataacttacggtaaatggcccgcctggctgaccgcccaacgacccccgcccattgacgtcaataatgacgtatgttcccatagtaacgccaatagggactttccattgacgtcaatgggtggagtatttacggtaaactgcccacttggcagtacatcaagtgtatcatatgccaagtacgccccctattgacgtcaatgacggtaaatggcccgcctggcattatgcccagtacatgaccttatgggactttcctacttggcagtacatctacgtattagtcatcgctattaccatggtgatgcggttttggcagtacatcaatgggcgtggatagcggtttgactcacggggatttccaagtctccaccccattgacgtcaatgggagtttgttttggcaccaaaatcaacgggactttccaaaatgtcgtaacaactccgccccattgacgcaaatgggcggtaggcgtgtacggtgggaggtctatataagcacttaagtggtttaggaaagcaggagctattcaggaagcaggggtcctcaccggtactagtgtttagtgaaccgtcagatcgcctggagacgccatccacgctgttttgacctccatagaagacaccgggaccgatccagcctccggactctagcctcgagcccaagcttggtaccgagctcggatccagccaccatgggagtcaaagttctgtttgccctgatctgcatcgctgnggccgaggccaagcccaccgagaacaacgaagacttcaacatcgtggccgtggccagcaacttcgcgaccacggatctcgatgctgaccgcgggaagttgcccggcaagaagctgccgctggaggtgctcaaagagctggaagccaatgcccggaaagctggctgcaccaggggctgtctgatctgcctgtcccacatcaagtgcacgcccaagatgaagaagttcatcccaggacgctgccacacctacgaaggcgacaaagagtccgcacagggcggcataggcgaggcgatcgtcgacattcctgagattcctgggttcaaggacttggagcccctggagcagttcatcgcacaggtcgatctgtgtgtggactgcacaactggctgcctcaaagggcttgccaacgtgcagtgttctgacctgctcaagaagtggctgccgcaacgctgtgcgacctttgccagcaagatccagggccaggtggacaagatcaagggggccggtggtgactaagcggccgcttcgagcagacatgataagatacattgatgagtttggacaaaccacaactagaatgcagtgaaaaaaatgctttatttgtgaaatttgtgatgctattgctttatttgtaaccattataagctgcaataaacaagttaacaacaacaattgcattcattttatgtttcaggttcagggggaggtgtgggaggttttttaaagcaagtaaaacctctacaaatgtggtacaaccggtctagttattaatagtaatcaattacggggtcattagttcatagcccatatatggagttccgcgttacataacttacggtaaatggcccgcctggctgaccgcccaacgacccccgcccattgacgtcaataatgacgtatgttcccatagtaacgccaatagggactttccattgacgtcaatgggtggagtatttacggtaaactgcccacttggcagtacatcaagtgtatcatatgccaagtacgccccctattgacgtcaatgacggtaaatggcccgcctggcattatgcccagtacatgaccttatgggactttcctacttggcagtacatctacgtattagtcatcgctattaccatggtgatgcggttttggcagtacatcaatgggcgtggatagcggtttgactcacggggatttccaagtctccaccccattgacgtcaatgggagtttgttttggcaccaaaatcaacgggactttccaaaatgtcgtaacaactccgccccattgacgcaaatgggcggtaggcgtgtacggtgggaggtctatataagcagagctctctggctaactagagaacccactgcttactggcttatcgaaattttaattaacgttggcaccatgctgctgctgctgctgctgctgggcctgaggctacagctctccctgggcatcatcccagttgaggaggagaacccggacttctggaaccgcgaggcagccgaggccctgggtgccgccaagaagctgcagcctgcacagacagccgccaagaacctcatcatcttcctgggcgatgggatgggggtgtctacggtgacagctgccaggatcctaaaagggcagaagaaggacaaactggggcctgagatacccctggccatggaccgcttcccatatgtggctctgtccaagacatacaatgtagacaaacatgtgccagacagtggagccacagccacggcctacctgtgcggggtcaagggcaacttccagaccattggcttgagtgcagccgcccgctttaaccagtgcaacacgacacgcggcaacgaggtcatctccgtgatgaatcgggccaagaaagcagggaagtcagtgggagtggtaaccaccacacgagtgcagcacgcctcgccagccggcacctacgcccacacggtgaaccgcaactggtactcggacgccgacgtgcctgcctcggcccgccaggaggggtgccaggacatcgctacgcagctcatctccaacatggacattgacgtgatcctaggtggaggccgaaagtacatgtttcgcatgggaaccccagaccctgagtacccagatgactacagccaaggtgggaccaggctggacgggaagaatctggtgcaggaatggctggcgaagcgccagggtgcccggtatgtgtggaaccgcactgagctcatgcaggcttccctggacccgtctgtgacccatctcatgggtctctttgagcctggagacatgaaatacgagatccaccgagactccacactggacccctccctgatggagatgacagaggctgccctgcgcctgctgagcaggaacccccgcggcttcttcctcttcgtggagggtggtcgcatcgaccatggtcatcatgaaagcagggcttaccgggcactgactgagacgatcatgttcgacgacgccattgagagggcgggccagctcaccagcgaggaggacacgctgagcctcgtcactgccgaccactcccacgtcttctccttcggaggctaccccctgcgagggagctccatcttcgggctggcccctggcaaggcccgggacaggaaggcctacacggtcctcctatacggaaacggtccaggctatgtgctcaaggacggcgcccggccggatgttaccgagagcgagagcgggagccccgagtatcggcagcagtcagcagtgcccctggacgaagagacccacgcaggcgaggacgtggcggtgttcgcgcgcggcccgcaggcgcacctggttcacggcgtgcaggagcagaccttcatagcgcacgtcatggccttcgccgcctgcctggagccctacaccgcctgcgacctggcgccccccgccggcaccaccgacgccgcgcacccgggttactctagagtcggggcggccggctaggtttaaacccgctgatcagcctcgactgtgccttctagttgccagccatctgttgtttgcccctcccccgtgccttccttgaccctggaaggtgccactcccactgtcctttcctaataaaatgaggaaattgcatcgcattgtctgagtaggtgtcattctattctggggggtggggtggggcaggacagcaagggggaggattgggaagacaatagcaggcatgctggggatgcggtgggctctatggcttctgaggcggaaagaaccagctggggctctagggggtatccccacgcgccctgtagcggcgcattaagcgcggcgggtgtggtggttacgcgcagcgtgaccgctacacttgccagcgccctagcgcccgctcctttcgctttcttcccttcctttctcgccacgttcgccggctttccccgtcaagctctaaatcgggggctccctttagggttccgatttagtgctttacggcacctcgaccccaaaaaacttgattagggtgatggttcacgtacctagaagttcctattccgaagttcctattctctagaaagtataggaacttccttggccaaaaagcctgaactcaccgcgacgtctgtcgagaagtttctgatcgaaaagttcgacagcgtctccgacctgatgcagctctcggagggcgaagaatctcgtgctttcagcttcgatgtaggagggcgtggatatgtcctgcgggtaaatagctgcgccgatggtttctacaaagatcgttatgtttatcggcactttgcatcggccgcgctcccgattccggaagtgcttgacattggggaattcagcgagagcctgacctattgcatctcccgccgtgcacagggtgtcacgttgcaagacctgcctgaaaccgaactgcccgctgttctgcagccggtcgcggaggccatggatgcgatcgctgcggccgatcttagccagacgagcgggttcggcccattcggaccgcaaggaatcggtcaatacactacatggcgtgatttcatatgcgcgattgctgatccccatgtgtatcactggcaaactgtgatggacgacaccgtcagtgcgtccgtcgcgcaggctctcgatgagctgatgctttgggccgaggactgccccgaagtccggcacctcgtgcacgcggatttcggctccaacaatgtcctgacggacaatggccgcataacagcggtcattgactggagcgaggcgatgttcggggattcccaatacgaggtcgccaacatcttcttctggaggccgtggttggcttgtatggagcagcagacgcgctacttcgagcggaggcatccggagcttgcaggatcgccgcggctccgggcgtatatgctccgcattggtcttgaccaactctatcagagcttggttgacggcaatttcgatgatgcagcttgggcgcagggtcgatgcgacgcaatcgtccgatccggagccgggactgtcgggcgtacacaaatcgcccgcagaagcgcggccgtctggaccgatggctgtgtagaagtactcgccgatagtggaaaccgacgccccagcactcgtccgagggcaaaggaatagcacgtactacgagatttcgattccaccgccgccttctatgaaaggttgggcttcggaatcgttttccgggacgccggctggatgatcctccagcgcggggatctcatgctggagttcttcgcccaccccaacttgtttattgcagcttataatggttacaaataaagcaatagcatcacaaatttcacaaataaagcatttttttcactgcattctagttgtggtttgtccaaactcatcaatgtatcttatcatgtctgtataccgtcgacctctagctagagcttggcgtaatcatggtcatagctgtttcctgtgtgaaattgttatccgctcacaattccacacaacatacgagccggaagcataaagtgtaaagcctggggtgcctaatgagtgagctaactcacattaattgcgttgcgctcactgcccgctttccagtcgggaaacctgtcgtgccagctgcattaatgaatcggccaacgcgcggggagaggcggtttgcgtattgggcgctcttccgcttcctcgctcactgactcgctgcgctcggtcgttcggctgcggcgagcggtatcagctcactcaaaggcggtaatacggttatccacagaatcaggggataacgcaggaaagaacatgtgagcaaaaggccagcaaaaggccaggaaccgtaaaaaggccgcgttgctggcgtttttccataggctccgcccccctgacgagcatcacaaaaatcgacgctcaagtcagaggtggcgaaacccgacaggactataaagataccaggcgtttccccctggaagctccctcgtgcgctctcctgttccgaccctgccgcttaccggatacctgtccgcctttctcccttcgggaagcgtggcgctttctcatagctcacgctgtaggtatctcagttcggtgtaggtcgttcgctccaagctgggctgtgtgcacgaaccccccgttcagcccgaccgctgcgccttatccggtaactatcgtcttgagtccaacccggtaagacacgacttatcgccactggcagcagccactggtaacaggattagcagagcgaggtatgtaggcggtgctacagagttcttgaagtggtggcctaactacggctacactagaagaacagtatttggtatctgcgctctgctgaagccagttaccttcggaaaaagagttggtagctcttgatccggcaaacaaaccaccgctggtagcggtggtttttttgtttgcaagcagcagattacgcgcagaaaaaaaggatctcaagaagatcctttgatcttttctacggggtctgacgctcagtggaacgaaaactcacgttaagggattttggtcatgagattatcaaaaaggatcttcacctagatccttttaaattaaaaatgaagttttaaatcaatctaaagtatatatgagtaaacttggtctgacagttaccaatgcttaatcagtgaggcacctatctcagcgatctgtctatttcgttcatccatagttgcctgactccccgtcgtgtagataactacgatacgggagggcttaccatctggccccagtgctgcaatgataccgcgagacccacgctcaccggctccagatttatcagcaataaaccagccagccggaagggccgagcgcagaagtggtcctgcaactttatccgcctccatccagtctattaattgttgccgggaagctagagtaagtagttcgccagttaatagtttgcgcaacgttgttgccattgctacaggcatcgtggtgtcacgctcgtcgtttggtatggcttcattcagctccggttcccaacgatcaaggcgagttacatgatcccccatgttgtgcaaaaaagcggttagctccttcggtcctccgatcgttgtcagaagtaagttggccgcagtgttatcactcatggttatggcagcactgcataattctcttactgtcatgccatccgtaagatgcttttctgtgactggtgagtactcaaccaagtcattctgagaatagtgtatgcggcgaccgagttgctcttgcccggcgtcaatacgggataataccgcgccacatagcagaactttaaaagtgctcatcattggaaaacgttcttcggggcgaaaactctcaaggatcttaccgctgttgagatccagttcgatgtaacccactcgtgcacccaactgatcttcagcatcttttactttcaccagcgtttctgggtgagcaaaaacaggaaggcaaaatgccgcaaaaaagggaataagggcgacacggaaatgttgaatactcatactcttcctttttcaatattattgaagcatttatcagggttattgtctcatgagcggatacatatttgaatgtatttagaaaaataaacaaataggggttccgcgcacatttccccgaaaagtgccacctgacgtc

SEQ ID NO: 288 - DNA, 5185 bp, Artificial Sequence
  Synthetic construct
tggcgaatgggacgcgccctgtagcggcgcattaagcgcggcgggtgtggtggttacgcgcagcgtgaccgctacacttgccagcgccctagcgcccgctcctttcgctttcttcccttcctttctcgccacgttcgccggctttccccgtcaagctctaaatcgggggctccctttagggttccgatttagtgctttacggcacctcgaccccaaaaaacttgattagggtgatggttcacgtagtgggccatcgccctgatagacggtttttcgccctttgacgttggagtccacgttctttaatagtggactcttgttccaaactggaacaacactcaaccctatctcggtctattcttttgatttataagggattttgccgatttcggcctattggttaaaaaatgagctgatttaacaaaaatttaacgcgaattttaacaaaatattaacgtttacaatttcaggtggcacttttcggggaaatgtgcgcggaacccctatttgtttatttttctaaatacattcaaatatgtatccgctcatgaattaattcttagaaaaactcatcgagcatcaaatgaaactgcaatttattcatatcaggattatcaataccatatttttgaaaaagccgtttctgtaatgaaggagaaaactcaccgaggcagttccataggatggcaagatcctggtatcggtctgcgattccgactcgtccaacatcaatacaacctattaatttcccctcgtcaaaaataaggttatcaagtgagaaatcaccatgagtgacgactgaatccggtgagaatggcaaaagtttatgcatttctttccagacttgttcaacaggccagccattacgctcgtcatcaaaatcactcgcatcaaccaaaccgttattcattcgtgattgcgcctgagcgagacgaaatacgcgatcgctgttaaaaggacaattacaaacaggaatcgaatgcaaccggcgcaggaacactgccagcgcatcaacaatattttcacctgaatcaggatattcttctaatacctggaatgctgttttcccggggatcgcagtggtgagtaaccatgcatcatcaggagtacggataaaatgcttgatggtcggaagaggcataaattccgtcagccagtttagtctgaccatctcatctgtaacatcattggcaacgctacctttgccatgtttcagaaacaactctggcgcatcgggcttcccatacaatcgatagattgtcgcacctgattgcccgacattatcgcgagcccatttatacccatataaatcagcatccatgttggaatttaatcgcggcctagagcaagacgtttcccgttgaatatggctcataacaccccttgtattactgtttatgtaagcagacagttttattgttcatgaccaaaatcccttaacgtgagttttcgttccactgagcgtcagaccccgtagaaaagatcaaaggatcttcttgagatcctttttttctgcgcgtaatctgctgcttgcaaacaaaaaaaccaccgctaccagcggtggtttgtttgccggatcaagagctaccaactctttttccgaaggtaactggcttcagcagagcgcagataccaaatactgtccttctagtgtagccgtagttaggccaccacttcaagaactctgtagcaccgcctacatacctcgctctgctaatcctgttaccagtggctgctgccagtggcgataagtcgtgtcttaccgggttggactcaagacgatagttaccggataaggcgcagcggtcgggctgaacggggggttcgtgcacacagcccagcttggagcgaacgacctacaccgaactgagatacctacagcgtgagctatgagaaagcgccacgcttcccgaagggagaaaggcggacaggtatccggtaagcggcagggtcggaacaggagagcgcacgagggagcttccagggggaaacgcctggtatctttatagtcctgtcgggtttcgccacctctgacttgagcgtcgatttttgtgatgctcgtcaggggggcggagcctatggaaaaacgccagcaacgcggcctttttacggttcctggccttttgctggccttttgctcacatgttctttcctgcgttatcccctgattctgtggataaccgtattaccgcctttgagtgagctgataccgctcgccgcagccgaacgaccgagcgcagcgagtcagtgagcgaggaagcggaagagcgcctgatgcggtattttctccttacgcatctgtgcggtatttcacaccgcatatatggtgcactctcagtacaatctgctctgatgccgcatagttaagccagtatacactccgctatcgctacgtgactgggtcatggctgcgccccgacacccgccaacacccgctgacgcgccctgacgggcttgtctgctcccggcatccgcttacagacaagctgtgaccgtctccgggagctgcatgtgtcagaggttttcaccgtcatcaccgaaacgcgcgaggcagctgcggtaaagctcatcagcgtggtcgtgaagcgattcacagatgtctgcctgttcatccgcgtccagctcgttgagtttctccagaagcgttaatgtctggcttctgataaagcgggccatgttaagggcggttttttcctgtttggtcactgatgcctccgtgtaagggggatttctgttcatgggggtaatgataccgatgaaacgagagaggatgctcacgatacgggttactgatgatgaacatgcccggttactggaacgttgtgagggtaaacaactggcggtatggatgcggcgggaccagagaaaaatcactcagggtcaatgccagcgcttcgttaatacagatgtaggtgttccacagggtagccagcagcatcctgcgatgcagatccggaacataatggtgcagggcgctgacttccgcgtttccagactttacgaaacacggaaaccgaagaccattcatgttgttgctcaggtcgcagacgttttgcagcagcagtcgcttcacgttcgctcgcgtatcggtgattcattctgctaaccagtaaggcaaccccgccagcctagccgggtcctcaacgacaggagcacgatcatgctagtcatgccccgcgcccaccggaaggagctgactgggttgaaggctctcaagggcatcggtcgagatcccggtgcctaatgagtgagctaacttacattaattgcgttgcgctcactgcccgctttccagtcgggaaacctgtcgtgccagctgcattaatgaatcggccaacgcgcggggagaggcggtttgcgtattgggcgccagggtggtttttcttttcaccagtgagacgggcaacagctgattgcccttcaccgcctggccctgagagagttgcagcaagcggtccacgctggtttgccccagcaggcgaaaatcctgtttgatggtggttaacggcgggatataacatgagctgtcttcggtatcgtcgtatcccactaccgagatgtccgcaccaacgcgcagcccggactcggtaatggcgcgcattgcgcccagcgccatctgatcgttggcaaccagcatcgcagtgggaacgatgccctcattcagcatttgcatggtttgttgaaaaccggacatggcactccagtcgccttcccgttccgctatcggctgaatttgattgcgagtgagatatttatgccagccagccagacgcagacgcgccgagacagaacttaatgggcccgctaacagcgcgatttgctggtgacccaatgcgaccagatgctccacgcccagtcgcgtaccgtcttcatgggagaaaataatactgttgatgggtgtctggtcagagacatcaagaaataacgccggaacattagtgcaggcagcttccacagcaatggcatcctggtcatccagcggatagttaatgatcagcccactgacgcgttgcgcgagaagattgtgcaccgccgctttacaggcttcgacgccgcttcgttctaccatcgacaccaccacgctggcacccagttgatcggcgcgagatttaatcgccgcgacaatttgcgacggcgcgtgcagggccagactggaggtggcaacgccaatcagcaacgactgtttgcccgccagttgttgtgccacgcggttgggaatgtaattcagctccgccatcgccgcttccactttttcccgcgttttcgcagaaacgtggctggcctggttcaccacgcgggaaacggtctgataagagacaccggcatactctgcgacatcgtataacgttactggtttcacattcaccaccctgaattgactctcttccgggcgctatcatgccataccgcgaaaggttttgcgccattcgatggtgtccgggatctcgacgctctcccttatgcgactcctgcattaggaagcagcccagtagtaggttgaggccgttgagcaccgccgccgcaaggaatggtgcatgcaaggagatggcgcccaacagtcccccggccacggggcctgccaccatacccacgccgaaacaagcgctcatgagcccgaagtggcgagcccgatcttccccatcggtgatgtcggcgatataggcgccagcaaccgcacctgtggcgccggtgatgccggccacgatgcgtccggcgtagaggatcgagatcgatctcgatcccgcgaaattaatacgactcactataggggaattgtgagcggataacaattcccctctagaaataattttgtttaactttaagaaggagatatacatatgcaccaccaccaccaccacggctatggccgcaaaaaacgccgccagcgccgccgcggctatccgtatgatgtgccggattatgccccatgggatatcggggatccgaattctgtacaggccttggcgcgcctgcaggcgagctccgtcgacaagcttgcggccgcactcgagcaccaccaccaccaccaccaccactaattgattaatacctaggctgctaaacaaagcccgaaaggaagctgagttggctgctgccaccgctgagcaataactagcataaccccttggggcctctaaacgggtcttgaggggttttttgctgaaaggaggaactatatccggat

SEQ ID NO: 289 - DNA, 5896 bp, Artificial Sequence
  Synthetic construct
tggcgaatgggacgcgccctgtagcggcgcattaagcgcggcgggtgtggtggttacgcgcagcgtgaccgctacacttgccagcgccctagcgcccgctcctttcgctttcttcccttcctttctcgccacgttcgccggctttccccgtcaagctctaaatcgggggctccctttagggttccgatttagtgctttacggcacctcgaccccaaaaaacttgattagggtgatggttcacgtagtgggccatcgccctgatagacggtttttcgccctttgacgttggagtccacgttctttaatagtggactcttgttccaaactggaacaacactcaaccctatctcggtctattcttttgatttataagggattttgccgatttcggcctattggttaaaaaatgagctgatttaacaaaaatttaacgcgaattttaacaaaatattaacgtttacaatttcaggtggcacttttcggggaaatgtgcgcggaacccctatttgtttatttttctaaatacattcaaatatgtatccgctcatgaattaattcttagaaaaactcatcgagcatcaaatgaaactgcaatttattcatatcaggattatcaataccatatttttgaaaaagccgtttctgtaatgaaggagaaaactcaccgaggcagttccataggatggcaagatcctggtatcggtctgcgattccgactcgtccaacatcaatacaacctattaatttcccctcgtcaaaaataaggttatcaagtgagaaatcaccatgagtgacgactgaatccggtgagaatggcaaaagtttatgcatttctttccagacttgttcaacaggccagccattacgctcgtcatcaaaatcactcgcatcaaccaaaccgttattcattcgtgattgcgcctgagcgagacgaaatacgcgatcgctgttaaaaggacaattacaaacaggaatcgaatgcaaccggcgcaggaacactgccagcgcatcaacaatattttcacctgaatcaggatattcttctaatacctggaatgctgttttcccggggatcgcagtggtgagtaaccatgcatcatcaggagtacggataaaatgcttgatggtcggaagaggcataaattccgtcagccagtttagtctgaccatctcatctgtaacatcattggcaacgctacctttgccatgtttcagaaacaactctggcgcatcgggcttcccatacaatcgatagattgtcgcacctgattgcccgacattatcgcgagcccatttatacccatataaatcagcatccatgttggaatttaatcgcggcctagagcaagacgtttcccgttgaatatggctcataacaccccttgtattactgtttatgtaagcagacagttttattgttcatgaccaaaatcccttaacgtgagttttcgttccactgagcgtcagaccccgtagaaaagatcaaaggatcttcttgagatcctttttttctgcgcgtaatctgctgcttgcaaacaaaaaaaccaccgctaccagcggtggtttgtttgccggatcaagagctaccaactctttttccgaaggtaactggcttcagcagagcgcagataccaaatactgtccttctagtgtagccgtagttaggccaccacttcaagaactctgtagcaccgcctacatacctcgctctgctaatcctgttaccagtggctgctgccagtggcgataagtcgtgtcttaccgggttggactcaagacgatagttaccggataaggcgcagcggtcgggctgaacggggggttcgtgcacacagcccagcttggagcgaacgacctacaccgaactgagatacctacagcgtgagctatgagaaagcgccacgcttcccgaagggagaaaggcggacaggtatccggtaagcggcagggtcggaacaggagagcgcacgagggagcttccagggggaaacgcctggtatctttatagtcctgtcgggtttcgccacctctgacttgagcgtcgatttttgtgatgctcgtcaggggggcggagcctatggaaaaacgccagcaacgcggcctttttacggttcctggccttttgctggccttttgctcacatgttctttcctgcgttatcccctgattctgtggataaccgtattaccgcctttgagtgagctgataccgctcgccgcagccgaacgaccgagcgcagcgagtcagtgagcgaggaagcggaagagcgcctgatgcggtattttctccttacgcatctgtgcggtatttcacaccgcatatatggtgcactctcagtacaatctgctctgatgccgcatagttaagccagtatacactccgctatcgctacgtgactgggtcatggctgcgccccgacacccgccaacacccgctgacgcgccctgacgggcttgtctgctcccggcatccgcttacagacaagctgtgaccgtctccgggagctgcatgtgtcagaggttttcaccgtcatcaccgaaacgcgcgaggcagctgcggtaaagctcatcagcgtggtcgtgaagcgattcacagatgtctgcctgttcatccgcgtccagctcgttgagtttctccagaagcgttaatgtctggcttctgataaagcgggccatgttaagggcggttttttcctgtttggtcactgatgcctccgtgtaagggggatttctgttcatgggggtaatgataccgatgaaacgagagaggatgctcacgatacgggttactgatgatgaacatgcccggttactggaacgttgtgagggtaaacaactggcggtatggatgcggcgggaccagagaaaaatcactcagggtcaatgccagcgcttcgttaatacagatgtaggtgttccacagggtagccagcagcatcctgcgatgcagatccggaacataatggtgcagggcgctgacttccgcgtttccagactttacgaaacacggaaaccgaagaccattcatgttgttgctcaggtcgcagacgttttgcagcagcagtcgcttcacgttcgctcgcgtatcggtgattcattctgctaaccagtaaggcaaccccgccagcctagccgggtcctcaacgacaggagcacgatcatgctagtcatgccccgcgcccaccggaaggagctgactgggttgaaggctctcaagggcatcggtcgagatcccggtgcctaatgagtgagctaacttacattaattgcgttgcgctcactgcccgctttccagtcgggaaacctgtcgtgccagctgcattaatgaatcggccaacgcgcggggagaggcggtttgcgtattgggcgccagggtggtttttcttttcaccagtgagacgggcaacagctgattgcccttcaccgcctggccctgagagagttgcagcaagcggtccacgctggtttgccccagcaggcgaaaatcctgtttgatggtggttaacggcgggatataacatgagctgtcttcggtatcgtcgtatcccactaccgagatgtccgcaccaacgcgcagcccggactcggtaatggcgcgcattgcgcccagcgccatctgatcgttggcaaccagcatcgcagtgggaacgatgccctcattcagcatttgcatggtttgttgaaaaccggacatggcactccagtcgccttcccgttccgctatcggctgaatttgattgcgagtgagatatttatgccagccagccagacgcagacgcgccgagacagaacttaatgggcccgctaacagcgcgatttgctggtgacccaatgcgaccagatgctccacgcccagtcgcgtaccgtcttcatgggagaaaataatactgttgatgggtgtctggtcagagacatcaagaaataacgccggaacattagtgcaggcagcttccacagcaatggcatcctggtcatccagcggatagttaatgatcagcccactgacgcgttgcgcgagaagattgtgcaccgccgctttacaggcttcgacgccgcttcgttctaccatcgacaccaccacgctggcacccagttgatcggcgcgagatttaatcgccgcgacaatttgcgacggcgcgtgcagggccagactggaggtggcaacgccaatcagcaacgactgtttgcccgccagttgttgtgccacgcggttgggaatgtaattcagctccgccatcgccgcttccactttttcccgcgttttcgcagaaacgtggctggcctggttcaccacgcgggaaacggtctgataagagacaccggcatactctgcgacatcgtataacgttactggtttcacattcaccaccctgaattgactctcttccgggcgctatcatgccataccgcgaaaggttttgcgccattcgatggtgtccgggatctcgacgctctcccttatgcgactcctgcattaggaagcagcccagtagtaggttgaggccgttgagcaccgccgccgcaaggaatggtgcatgcaaggagatggcgcccaacagtcccccggccacggggcctgccaccatacccacgccgaaacaagcgctcatgagcccgaagtggcgagcccgatcttccccatcggtgatgtcggcgatataggcgccagcaaccgcacctgtggcgccggtgatgccggccacgatgcgtccggcgtagaggatcgagatcgatctcgatcccgcgaaattaatacgactcactataggggaattgtgagcggataacaattcccctctagaaataattttgtttaactttaagaaggagatatacatatgcaccaccaccaccaccacggctatggccgcaaaaaacgccgccagcgccgccgcggctatccgtatgatgtgccggattatgccccatgccagccgatgaaacgtctgaccctgggcaacgatatcatggcggcggcggttcggatgaacatccagatgctgctggaggcggccgactatctggagcggcgggagagagaagctgaacatggttatgcctccatgttaccatacccgaaaaagaaacgtaaagtggggctcgagcccggggagaagccatataaatgtcccgagtgtggcaagtccttttctagatcagataatttagtaagacatcagagaacgcacaccggggagaagccgtacaagtgccctgaatgtggtaagtcattttcgagaagtgatgaattagtaagacaccagcggactcataccggggaaaagccctacaagtgcccggaatgcggcaagtcttttagcaccagcggacatttagtaagacaccagagaacccacaccggggagaagccttataagtgccctgagtgtggcaaaagcttcagcgatcctggaaatttagtaagacaccaacgcacccacaccggggaaaaaccttacaagtgccctgagtgcggcaagagcttctctcaatcaagttcattagtaagacaccagaggactcataccggggagaaaccatacaagtgtccagagtgcgggaaaagctttagtacaagcggtgagttagtaagacaccaacgaacacacaccggtgagcagaaactcatctctgaagaagatctggaacaaaagttgatttcagaagaagatctggaacagaagctcatctctgaggaagatctgtaagcggccgcactcgagcaccaccaccaccaccaccaccactaattgattaatacctaggctgctaaacaaagcccgaaaggaagctgagttggctgctgccaccgctgagcaataactagcataaccccttggggcctctaaacgggtcttgaggggttttttgctgaaaggaggaactatatccggat

SEQ ID NO: 290 - DNA, 5896 bp, Artificial Sequence
  synthetic construct
tggcgaatgggacgcgccctgtagcggcgcattaagcgcggcgggtgtggtggttacgcgcagcgtgaccgctacacttgccagcgccctagcgcccgctcctttcgctttcttcccttcctttctcgccacgttcgccggctttccccgtcaagctctaaatcgggggctccctttagggttccgatttagtgctttacggcacctcgaccccaaaaaacttgattagggtgatggttcacgtagtgggccatcgccctgatagacggtttttcgccctttgacgttggagtccacgttctttaatagtggactcttgttccaaactggaacaacactcaaccctatctcggtctattcttttgatttataagggattttgccgatttcggcctattggttaaaaaatgagctgatttaacaaaaatttaacgcgaattttaacaaaatattaacgtttacaatttcaggtggcacttttcggggaaatgtgcgcggaacccctatttgtttatttttctaaatacattcaaatatgtatccgctcatgaattaattcttagaaaaactcatcgagcatcaaatgaaactgcaatttattcatatcaggattatcaataccatatttttgaaaaagccgtttctgtaatgaaggagaaaactcaccgaggcagttccataggatggcaagatcctggtatcggtctgcgattccgactcgtccaacatcaatacaacctattaatttcccctcgtcaaaaataaggttatcaagtgagaaatcaccatgagtgacgactgaatccggtgagaatggcaaaagtttatgcatttctttccagacttgttcaacaggccagccattacgctcgtcatcaaaatcactcgcatcaaccaaaccgttattcattcgtgattgcgcctgagcgagacgaaatacgcgatcgctgttaaaaggacaattacaaacaggaatcgaatgcaaccggcgcaggaacactgccagcgcatcaacaatattttcacctgaatcaggatattcttctaatacctggaatgctgttttcccggggatcgcagtggtgagtaaccatgcatcatcaggagtacggataaaatgcttgatggtcggaagaggcataaattccgtcagccagtttagtctgaccatctcatctgtaacatcattggcaacgctacctttgccatgtttcagaaacaactctggcgcatcgggcttcccatacaatcgatagattgtcgcacctgattgcccgacattatcgcgagcccatttatacccatataaatcagcatccatgttggaatttaatcgcggcctagagcaagacgtttcccgttgaatatggctcataacaccccttgtattactgtttatgtaagcagacagttttattgttcatgaccaaaatcccttaacgtgagttttcgttccactgagcgtcagaccccgtagaaaagatcaaaggatcttcttgagatcctttttttctgcgcgtaatctgctgcttgcaaacaaaaaaaccaccgctaccagcggtggtttgtttgccggatcaagagctaccaactctttttccgaaggtaactggcttcagcagagcgcagataccaaatactgtccttctagtgtagccgtagttaggccaccacttcaagaactctgtagcaccgcctacatacctcgctctgctaatcctgttaccagtggctgctgccagtggcgataagtcgtgtcttaccgggttggactcaagacgatagttaccggataaggcgcagcggtcgggctgaacggggggttcgtgcacacagcccagcttggagcgaacgacctacaccgaactgagatacctacagcgtgagctatgagaaagcgccacgcttcccgaagggagaaaggcggacaggtatccggtaagcggcagggtcggaacaggagagcgcacgagggagcttccagggggaaacgcctggtatctttatagtcctgtcgggtttcgccacctctgacttgagcgtcgatttttgtgatgctcgtcaggggggcggagcctatggaaaaacgccagcaacgcggcctttttacggttcctggccttttgctggccttttgctcacatgttctttcctgcgttatcccctgattctgtggataaccgtattaccgcctttgagtgagctgataccgctcgccgcagccgaacgaccgagcgcagcgagtcagtgagcgaggaagcggaagagcgcctgatgcggtattttctccttacgcatctgtgcggtatttcacaccgcatatatggtgcactctcagtacaatctgctctgatgccgcatagttaagccagtatacactccgctatcgctacgtgactgggtcatggctgcgccccgacacccgccaacacccgctgacgcgccctgacgggcttgtctgctcccggcatccgcttacagacaagctgtgaccgtctccgggagctgcatgtgtcagaggttttcaccgtcatcaccgaaacgcgcgaggcagctgcggtaaagctcatcagcgtggtcgtgaagcgattcacagatgtctgcctgttcatccgcgtccagctcgttgagtttctccagaagcgttaatgtctggcttctgataaagcgggccatgttaagggcggttttttcctgtttggtcactgatgcctccgtgtaagggggatttctgttcatgggggtaatgataccgatgaaacgagagaggatgctcacgatacgggttactgatgatgaacatgcccggttactggaacgttgtgagggtaaacaactggcggtatggatgcggcgggaccagagaaaaatcactcagggtcaatgccagcgcttcgttaatacagatgtaggtgttccacagggtagccagcagcatcctgcgatgcagatccggaacataatggtgcagggcgctgacttccgcgtttccagactttacgaaacacggaaaccgaagaccattcatgttgttgctcaggtcgcagacgttttgcagcagcagtcgcttcacgttcgctcgcgtatcggtgattcattctgctaaccagtaaggcaaccccgccagcctagccgggtcctcaacgacaggagcacgatcatgctagtcatgccccgcgcccaccggaaggagctgactgggttgaaggctctcaagggcatcggtcgagatcccggtgcctaatgagtgagctaacttacattaattgcgttgcgctcactgcccgctttccagtcgggaaacctgtcgtgccagctgcattaatgaatcggccaacgcgcggggagaggcggtttgcgtattgggcgccagggtggtttttcttttcaccagtgagacgggcaacagctgattgcccttcaccgcctggccctgagagagttgcagcaagcggtccacgctggtttgccccagcaggcgaaaatcctgtttgatggtggttaacggcgggatataacatgagctgtcttcggtatcgtcgtatcccactaccgagatgtccgcaccaacgcgcagcccggactcggtaatggcgcgcattgcgcccagcgccatctgatcgttggcaaccagcatcgcagtgggaacgatgccctcattcagcatttgcatggtttgttgaaaaccggacatggcactccagtcgccttcccgttccgctatcggctgaatttgattgcgagtgagatatttatgccagccagccagacgcagacgcgccgagacagaacttaatgggcccgctaacagcgcgatttgctggtgacccaatgcgaccagatgctccacgcccagtcgcgtaccgtcttcatgggagaaaataatactgttgatgggtgtctggtcagagacatcaagaaataacgccggaacattagtgcaggcagcttccacagcaatggcatcctggtcatccagcggatagttaatgatcagcccactgacgcgttgcgcgagaagattgtgcaccgccgctttacaggcttcgacgccgcttcgttctaccatcgacaccaccacgctggcacccagttgatcggcgcgagatttaatcgccgcgacaatttgcgacggcgcgtgcagggccagactggaggtggcaacgccaatcagcaacgactgtttgcccgccagttgttgtgccacgcggttgggaatgtaattcagctccgccatcgccgcttccactttttcccgcgttttcgcagaaacgtggctggcctggttcaccacgcgggaaacggtctgataagagacaccggcatactctgcgacatcgtataacgttactggtttcacattcaccaccctgaattgactctcttccgggcgctatcatgccataccgcgaaaggttttgcgccattcgatggtgtccgggatctcgacgctctcccttatgcgactcctgcattaggaagcagcccagtagtaggttgaggccgttgagcaccgccgccgcaaggaatggtgcatgcaaggagatggcgcccaacagtcccccggccacggggcctgccaccatacccacgccgaaacaagcgctcatgagcccgaagtggcgagcccgatcttccccatcggtgatgtcggcgatataggcgccagcaaccgcacctgtggcgccggtgatgccggccacgatgcgtccggcgtagaggatcgagatcgatctcgatcccgcgaaattaatacgactcactataggggaattgtgagcggataacaattcccctctagaaataattttgtttaactttaagaaggagatatacatatgcaccaccaccaccaccacggctatggccgcaaaaaacgccgccagcgccgccgcggctatccgtatgatgtgccggattatgccccatgccagccgatgaaacgtctgaccctgggcaacgatatcatggcggcggcggttcggatgaacatccagatgctgctggaggcggccgactatctggagcggcgggagagagaagctgaacatggttatgcctccatgttaccatacccgaaaaagaaacgtaaagtggggctcgagcccggggaaaaaccgtacaagtgtcctgagtgcgggaagagtttctccgatccgggccacttagtaagacatcagaggacacataccggggaaaagccttataagtgccccgaatgcggaaagagcttctcaaggaatgatgcacttaccgagcatcaaaggactcataccggggaaaagccctacaagtgccccgaatgcgggaagtcttttagtcagagtggaaatcttaccgagcaccagagaacacacaccggggaaaagccctacaagtgtcctgagtgcggaaagtctttctccactagcggttcattagtaagacaccagaggacacacaccggggaaaagccctacaagtgcccggaatgcggcaagtcttttagcaccagcggacatttagtaagacaccagagaacccacaccggggagaagccctataaatgtccagaatgtggaaagtcctttagcacgtcagggaacttagtaagacaccagcgaactcataccggtgagcagaaactcatctctgaagaagatctggaacaaaagttgatttcagaagaagatctggaacagaagctcatctctgaggaagatctgtaagcggccgcactcgagcaccaccaccaccaccaccaccactaattgattaatacctaggctgctaaacaaagcccgaaaggaagctgagttggctgctgccaccgctgagcaataactagcataaccccttggggcctctaaacgggtcttgaggggttttttgctgaaaggaggaactatatccggat

SEQ ID NO: 291 - DNA, 5986 bp, Artificial Sequence
  synthetic construct
  misc_feature (5008)..(5008): n is a, c, g, or t
tggcgaatgggacgcgccctgtagcggcgcattaagcgcggcgggtgtggtggttacgcgcagcgtgaccgctacacttgccagcgccctagcgcccgctcctttcgctttcttcccttcctttctcgccacgttcgccggctttccccgtcaagctctaaatcgggggctccctttagggttccgatttagtgctttacggcacctcgaccccaaaaaacttgattagggtgatggttcacgtagtgggccatcgccctgatagacggtttttcgccctttgacgttggagtccacgttctttaatagtggactcttgttccaaactggaacaacactcaaccctatctcggtctattcttttgatttataagggattttgccgatttcggcctattggttaaaaaatgagctgatttaacaaaaatttaacgcgaattttaacaaaatattaacgtttacaatttcaggtggcacttttcggggaaatgtgcgcggaacccctatttgtttatttttctaaatacattcaaatatgtatccgctcatgaattaattcttagaaaaactcatcgagcatcaaatgaaactgcaatttattcatatcaggattatcaataccatatttttgaaaaagccgtttctgtaatgaaggagaaaactcaccgaggcagttccataggatggcaagatcctggtatcggtctgcgattccgactcgtccaacatcaatacaacctattaatttcccctcgtcaaaaataaggttatcaagtgagaaatcaccatgagtgacgactgaatccggtgagaatggcaaaagtttatgcatttctttccagacttgttcaacaggccagccattacgctcgtcatcaaaatcactcgcatcaaccaaaccgttattcattcgtgattgcgcctgagcgagacgaaatacgcgatcgctgttaaaaggacaattacaaacaggaatcgaatgcaaccggcgcaggaacactgccagcgcatcaacaatattttcacctgaatcaggatattcttctaatacctggaatgctgttttcccggggatcgcagtggtgagtaaccatgcatcatcaggagtacggataaaatgcttgatggtcggaagaggcataaattccgtcagccagtttagtctgaccatctcatctgtaacatcattggcaacgctacctttgccatgtttcagaaacaactctggcgcatcgggcttcccatacaatcgatagattgtcgcacctgattgcccgacattatcgcgagcccatttatacccatataaatcagcatccatgttggaatttaatcgcggcctagagcaagacgtttcccgttgaatatggctcataacaccccttgtattactgtttatgtaagcagacagttttattgttcatgaccaaaatcccttaacgtgagttttcgttccactgagcgtcagaccccgtagaaaagatcaaaggatcttcttgagatcctttttttctgcgcgtaatctgctgcttgcaaacaaaaaaaccaccgctaccagcggtggtttgtttgccggatcaagagctaccaactctttttccgaaggtaactggcttcagcagagcgcagataccaaatactgtccttctagtgtagccgtagttaggccaccacttcaagaactctgtagcaccgcctacatacctcgctctgctaatcctgttaccagtggctgctgccagtggcgataagtcgtgtcttaccgggttggactcaagacgatagttaccggataaggcgcagcggtcgggctgaacggggggttcgtgcacacagcccagcttggagcgaacgacctacaccgaactgagatacctacagcgtgagctatgagaaagcgccacgcttcccgaagggagaaaggcggacaggtatccggtaagcggcagggtcggaacaggagagcgcacgagggagcttccagggggaaacgcctggtatctttatagtcctgtcgggtttcgccacctctgacttgagcgtcgatttttgtgatgctcgtcaggggggcggagcctatggaaaaacgccagcaacgcggcctttttacggttcctggccttttgctggccttttgctcacatgttctttcctgcgttatcccctgattctgtggataaccgtattaccgcctttgagtgagctgataccgctcgccgcagccgaacgaccgagcgcagcgagtcagtgagcgaggaagcggaagagcgcctgatgcggtattttctccttacgcatctgtgcggtatttcacaccgcatatatggtgcactctcagtacaatctgctctgatgccgcatagttaagccagtatacactccgctatcgctacgtgactgggtcatggctgcgccccgacacccgccaacacccgctgacgcgccctgacgggcttgtctgctcccggcatccgcttacagacaagctgtgaccgtctccgggagctgcatgtgtcagaggttttcaccgtcatcaccgaaacgcgcgaggcagctgcggtaaagctcatcagcgtggtcgtgaagcgattcacagatgtctgcctgttcatccgcgtccagctcgttgagtttctccagaagcgttaatgtctggcttctgataaagcgggccatgttaagggcggttttttcctgtttggtcactgatgcctccgtgtaagggggatttctgttcatgggggtaatgataccgatgaaacgagagaggatgctcacgatacgggttactgatgatgaacatgcccggttactggaacgttgtgagggtaaacaactggcggtatggatgcggcgggaccagagaaaaatcactcagggtcaatgccagcgcttcgttaatacagatgtaggtgttccacagggtagccagcagcatcctgcgatgcagatccggaacataatggtgcagggcgctgacttccgcgtttccagactttacgaaacacggaaaccgaagaccattcatgttgttgctcaggtcgcagacgttttgcagcagcagtcgcttcacgttcgctcgcgtatcggtgattcattctgctaaccagtaaggcaaccccgccagcctagccgggtcctcaacgacaggagcacgatcatgctagtcatgccccgcgcccaccggaaggagctgactgggttgaaggctctcaagggcatcggtcgagatcccggtgcctaatgagtgagctaacttacattaattgcgttgcgctcactgcccgctttccagtcgggaaacctgtcgtgccagctgcattaatgaatcggccaacgcgcggggagaggcggtttgcgtattgggcgccagggtggtttttcttttcaccagtgagacgggcaacagctgattgcccttcaccgcctggccctgagagagttgcagcaagcggtccacgctggtttgccccagcaggcgaaaatcctgtttgatggtggttaacggcgggatataacatgagctgtcttcggtatcgtcgtatcccactaccgagatgtccgcaccaacgcgcagcccggactcggtaatggcgcgcattgcgcccagcgccatctgatcgttggcaaccagcatcgcagtgggaacgatgccctcattcagcatttgcatggtttgttgaaaaccggacatggcactccagtcgccttcccgttccgctatcggctgaatttgattgcgagtgagatatttatgccagccagccagacgcagacgcgccgagacagaacttaatgggcccgctaacagcgcgatttgctggtgacccaatgcgaccagatgctccacgcccagtcgcgtaccgtcttcatgggagaaaataatactgttgatgggtgtctggtcagagacatcaagaaataacgccggaacattagtgcaggcagcttccacagcaatggcatcctggtcatccagcggatagttaatgatcagcccactgacgcgttgcgcgagaagattgtgcaccgccgctttacaggcttcgacgccgcttcgttctaccatcgacaccaccacgctggcacccagttgatcggcgcgagatttaatcgccgcgacaatttgcgacggcgcgtgcagggccagactggaggtggcaacgccaatcagcaacgactgtttgcccgccagttgttgtgccacgcggttgggaatgtaattcagctccgccatcgccgcttccactttttcccgcgttttcgcagaaacgtggctggcctggttcaccacgcgggaaacggtctgataagagacaccggcatactctgcgacatcgtataacgttactggtttcacattcaccaccctgaattgactctcttccgggcgctatcatgccataccgcgaaaggttttgcgccattcgatggtgtccgggatctcgacgctctcccttatgcgactcctgcattaggaagcagcccagtagtaggttgaggccgttgagcaccgccgccgcaaggaatggtgcatgcaaggagatggcgcccaacagtcccccggccacggggcctgccaccatacccacgccgaaacaagcgctcatgagcccgaagtggcgagcccgatcttccccatcggtgatgtcggcgatataggcgccagcaaccgcacctgtggcgccggtgatgccggccacgatgcgtccggcgtagaggatcgagatcgatctcgatcccgcgaaattaatacgactcactataggggaattgtgagcggataacaattcccctctagaaataattttgtttaactttaagaaggagatatacatatgcaccaccaccaccaccacggctatggccgcaaaaaacgccgccagcgccgccgcggctatccgtatgatgtgccggattatgccccatgccagccgatgaaacgtctgaccctgggcaacgatatcatgccgaaaaagaaacgtaaagtggggctcgagcccggggngaagccctataaatgccctgaatgcgggaaatctttctcttctaagaaggcactcacagaacaccagcggacacacaccggggaaaaaccgtacaagtgtcctgagtgcgggaagagtttctccgatccgggccacttagtaagacatcagaggacacataccggggagaagccatataaatgtcccgagtgtggcaagtccttttctagatcagataatttagtaagacatcagagaacgcacaccggggagaagccatataaatgtcccgagtgtggcaagtccttttctagatcagataatttagtaagacatcagagaacgcacaccggggaaaagccatataaatgccccgagtgcggcaaatcattcagccaaagtagcaacttagtaagacaccagcgcacccataccggggaaaaaccgtacaagtgtcctgagtgcgggaagagtttctccgatccgggccacttagtaagacatcagaggacacataccggtggcggcagcggcggcagcgaattcgggcgcgccgacgcgctggacgatttcgatctcgacatgctgggttctgatgccctcgatgactttgacctggatatgttgggaagcgacgcattggatgactttgatctggacatgctcggctccgatgctctggacgatttcgatctcgatatgttaattaacggatccgagcagaaactcatctctgaagaagatctggaacaaaagttgatttcagaagaagatctggaacagaagctcatctctgaggaagatctgtaagcggccgcactcgagcaccaccaccaccaccaccaccactaattgattaatacctaggctgctaaacaaagcccgaaaggaagctgagttggctgctgccaccgctgagcaataactagcataaccccttggggcctctaaacgggtcttgaggggttttttgctgaaaggaggaactatatccggat

SEQ ID NO: 292 - DNA, 5986 bp, Artificial Sequence
  synthetic construct
tggcgaatgggacgcgccctgtagcggcgcattaagcgcggcgggtgtggtggttacgcgcagcgtgaccgctacacttgccagcgccctagcgcccgctcctttcgctttcttcccttcctttctcgccacgttcgccggctttccccgtcaagctctaaatcgggggctccctttagggttccgatttagtgctttacggcacctcgaccccaaaaaacttgattagggtgatggttcacgtagtgggccatcgccctgatagacggtttttcgccctttgacgttggagtccacgttctttaatagtggactcttgttccaaactggaacaacactcaaccctatctcggtctattcttttgatttataagggattttgccgatttcggcctattggttaaaaaatgagctgatttaacaaaaatttaacgcgaattttaacaaaatattaacgtttacaatttcaggtggcacttttcggggaaatgtgcgcggaacccctatttgtttatttttctaaatacattcaaatatgtatccgctcatgaattaattcttagaaaaactcatcgagcatcaaatgaaactgcaatttattcatatcaggattatcaataccatatttttgaaaaagccgtttctgtaatgaaggagaaaactcaccgaggcagttccataggatggcaagatcctggtatcggtctgcgattccgactcgtccaacatcaatacaacctattaatttcccctcgtcaaaaataaggttatcaagtgagaaatcaccatgagtgacgactgaatccggtgagaatggcaaaagtttatgcatttctttccagacttgttcaacaggccagccattacgctcgtcatcaaaatcactcgcatcaaccaaaccgttattcattcgtgattgcgcctgagcgagacgaaatacgcgatcgctgttaaaaggacaattacaaacaggaatcgaatgcaaccggcgcaggaacactgccagcgcatcaacaatattttcacctgaatcaggatattcttctaatacctggaatgctgttttcccggggatcgcagtggtgagtaaccatgcatcatcaggagtacggataaaatgcttgatggtcggaagaggcataaattccgtcagccagtttagtctgaccatctcatctgtaacatcattggcaacgctacctttgccatgtttcagaaacaactctggcgcatcgggcttcccatacaatcgatagattgtcgcacctgattgcccgacattatcgcgagcccatttatacccatataaatcagcatccatgttggaatttaatcgcggcctagagcaagacgtttcccgttgaatatggctcataacaccccttgtattactgtttatgtaagcagacagttttattgttcatgaccaaaatcccttaacgtgagttttcgttccactgagcgtcagaccccgtagaaaagatcaaaggatcttcttgagatcctttttttctgcgcgtaatctgctgcttgcaaacaaaaaaaccaccgctaccagcggtggtttgtttgccggatcaagagctaccaactctttttccgaaggtaactggcttcagcagagcgcagataccaaatactgtccttctagtgtagccgtagttaggccaccacttcaagaactctgtagcaccgcctacatacctcgctctgctaatcctgttaccagtggctgctgccagtggcgataagtcgtgtcttaccgggttggactcaagacgatagttaccggataaggcgcagcggtcgggctgaacggggggttcgtgcacacagcccagcttggagcgaacgacctacaccgaactgagatacctacagcgtgagctatgagaaagcgccacgcttcccgaagggagaaaggcggacaggtatccggtaagcggcagggtcggaacaggagagcgcacgagggagcttccagggggaaacgcctggtatctttatagtcctgtcgggtttcgccacctctgacttgagcgtcgatttttgtgatgctcgtcaggggggcggagcctatggaaaaacgccagcaacgcggcctttttacggttcctggccttttgctggccttttgctcacatgttctttcctgcgttatcccctgattctgtggataaccgtattaccgcctttgagtgagctgataccgctcgccgcagccgaacgaccgagcgcagcgagtcagtgagcgaggaagcggaagagcgcctgatgcggtattttctccttacgcatctgtgcggtatttcacaccgcatatatggtgcactctcagtacaatctgctctgatgccgcatagttaagccagtatacactccgctatcgctacgtgactgggtcatggctgcgccccgacacccgccaacacccgctgacgcgccctgacgggcttgtctgctcccggcatccgcttacagacaagctgtgaccgtctccgggagctgcatgtgtcagaggttttcaccgtcatcaccgaaacgcgcgaggcagctgcggtaaagctcatcagcgtggtcgtgaagcgattcacagatgtctgcctgttcatccgcgtccagctcgttgagtttctccagaagcgttaatgtctggcttctgataaagcgggccatgttaagggcggttttttcctgtttggtcactgatgcctccgtgtaagggggatttctgttcatgggggtaatgataccgatgaaacgagagaggatgctcacgatacgggttactgatgatgaacatgcccggttactggaacgttgtgagggtaaacaactggcggtatggatgcggcgggaccagagaaaaatcactcagggtcaatgccagcgcttcgttaatacagatgtaggtgttccacagggtagccagcagcatcctgcgatgcagatccggaacataatggtgcagggcgctgacttccgcgtttccagactttacgaaacacggaaaccgaagaccattcatgttgttgctcaggtcgcagacgttttgcagcagcagtcgcttcacgttcgctcgcgtatcggtgattcattctgctaaccagtaaggcaaccccgccagcctagccgggtcctcaacgacaggagcacgatcatgctagtcatgccccgcgcccaccggaaggagctgactgggttgaaggctctcaagggcatcggtcgagatcccggtgcctaatgagtgagctaacttacattaattgcgttgcgctcactgcccgctttccagtcgggaaacctgtcgtgccagctgcattaatgaatcggccaacgcgcggggagaggcggtttgcgtattgggcgccagggtggtttttcttttcaccagtgagacgggcaacagctgattgcccttcaccgcctggccctgagagagttgcagcaagcggtccacgctggtttgccccagcaggcgaaaatcctgtttgatggtggttaacggcgggatataacatgagctgtcttcggtatcgtcgtatcccactaccgagatgtccgcaccaacgcgcagcccggactcggtaatggcgcgcattgcgcccagcgccatctgatcgttggcaaccagcatcgcagtgggaacgatgccctcattcagcatttgcatggtttgttgaaaaccggacatggcactccagtcgccttcccgttccgctatcggctgaatttgattgcgagtgagatatttatgccagccagccagacgcagacgcgccgagacagaacttaatgggcccgctaacagcgcgatttgctggtgacccaatgcgaccagatgctccacgcccagtcgcgtaccgtcttcatgggagaaaataatactgttgatgggtgtctggtcagagacatcaagaaataacgccggaacattagtgcaggcagcttccacagcaatggcatcctggtcatccagcggatagttaatgatcagcccactgacgcgttgcgcgagaagattgtgcaccgccgctttacaggcttcgacgccgcttcgttctaccatcgacaccaccacgctggcacccagttgatcggcgcgagatttaatcgccgcgacaatttgcgacggcgcgtgcagggccagactggaggtggcaacgccaatcagcaacgactgtttgcccgccagttgttgtgccacgcggttgggaatgtaattcagctccgccatcgccgcttccactttttcccgcgttttcgcagaaacgtggctggcctggttcaccacgcgggaaacggtctgataagagacaccggcatactctgcgacatcgtataacgttactggtttcacattcaccaccctgaattgactctcttccgggcgctatcatgccataccgcgaaaggttttgcgccattcgatggtgtccgggatctcgacgctctcccttatgcgactcctgcattaggaagcagcccagtagtaggttgaggccgttgagcaccgccgccgcaaggaatggtgcatgcaaggagatggcgcccaacagtcccccggccacggggcctgccaccatacccacgccgaaacaagcgctcatgagcccgaagtggcgagcccgatcttccccatcggtgatgtcggcgatataggcgccagcaaccgcacctgtggcgccggtgatgccggccacgatgcgtccggcgtagaggatcgagatcgatctcgatcccgcgaaattaatacgactcactataggggaattgtgagcggataacaattcccctctagaaataattttgtttaactttaagaaggagatatacatatgcaccaccaccaccaccacggctatggccgcaaaaaacgccgccagcgccgccgcggctatccgtatgatgtgccggattatgccccatgccagccgatgaaacgtctgaccctgggcaacgatatcatgccgaaaaagaaacgtaaagtggggctcgagcccggggagaaaccatacaaatgccccgagtgtggaaagtcatttagtgatccaggcgcattagtaagacatcagcggacacataccggggagaagccatataaatgtcccgagtgtggcaagtccttttctagatcagataatttagtaagacatcagagaacgcacaccggggagaagccctacaagtgtccagaatgcggaaagagtttctccagaagtgacaaattagtaagacaccagagaacccataccggggaaaaaccgtacaagtgtcctgagtgcgggaagagtttctccgatccgggccacttagtaagacatcagaggacacataccggggaaaaaccgtataaatgtcctgagtgcggtaagtctttttccgactgtagagacttagcgagacaccaacgtactcataccggggagaaaccatacaaatgtcccgaatgtggcaagagtttcagcagtaaaaagcatctcgctgagcatcagagaactcacaccggtggcggcagcggcggcagcgaattcgggcgcgccgacgcgctggacgatttcgatctcgacatgctgggttctgatgccctcgatgactttgacctggatatgttgggaagcgacgcattggatgactttgatctggacatgctcggctccgatgctctggacgatttcgatctcgatatgttaattaacggatccgagcagaaactcatctctgaagaagatctggaacaaaagttgatttcagaagaagatctggaacagaagctcatctctgaggaagatctgtaagcggccgcactcgagcaccaccaccaccaccaccaccactaattgattaatacctaggctgctaaacaaagcccgaaaggaagctgagttggctgctgccaccgctgagcaataactagcataaccccttggggcctctaaacgggtcttgaggggttttttgctgaaaggaggaactatatccggat

SEQ ID NO: 293 - DNA, 5986 bp, Artificial Sequence
  synthetic construct
tggcgaatgggacgcgccctgtagcggcgcattaagcgcggcgggtgtggtggttacgcgcagcgtgaccgctacacttgccagcgccctagcgcccgctcctttcgctttcttcccttcctttctcgccacgttcgccggctttccccgtcaagctctaaatcgggggctccctttagggttccgatttagtgctttacggcacctcgaccccaaaaaacttgattagggtgatggttcacgtagtgggccatcgccctgatagacggtttttcgccctttgacgttggagtccacgttctttaatagtggactcttgttccaaactggaacaacactcaaccctatctcggtctattcttttgatttataagggattttgccgatttcggcctattggttaaaaaatgagctgatttaacaaaaatttaacgcgaattttaacaaaatattaacgtttacaatttcaggtggcacttttcggggaaatgtgcgcggaacccctatttgtttatttttctaaatacattcaaatatgtatccgctcatgaattaattcttagaaaaactcatcgagcatcaaatgaaactgcaatttattcatatcaggattatcaataccatatttttgaaaaagccgtttctgtaatgaaggagaaaactcaccgaggcagttccataggatggcaagatcctggtatcggtctgcgattccgactcgtccaacatcaatacaacctattaatttcccctcgtcaaaaataaggttatcaagtgagaaatcaccatgagtgacgactgaatccggtgagaatggcaaaagtttatgcatttctttccagacttgttcaacaggccagccattacgctcgtcatcaaaatcactcgcatcaaccaaaccgttattcattcgtgattgcgcctgagcgagacgaaatacgcgatcgctgttaaaaggacaattacaaacaggaatcgaatgcaaccggcgcaggaacactgccagcgcatcaacaatattttcacctgaatcaggatattcttctaatacctggaatgctgttttcccggggatcgcagtggtgagtaaccatgcatcatcaggagtacggataaaatgcttgatggtcggaagaggcataaattccgtcagccagtttagtctgaccatctcatctgtaacatcattggcaacgctacctttgccatgtttcagaaacaactctggcgcatcgggcttcccatacaatcgatagattgtcgcacctgattgcccgacattatcgcgagcccatttatacccatataaatcagcatccatgttggaatttaatcgcggcctagagcaagacgtttcccgttgaatatggctcataacaccccttgtattactgtttatgtaagcagacagttttattgttcatgaccaaaatcccttaacgtgagttttcgttccactgagcgtcagaccccgtagaaaagatcaaaggatcttcttgagatcctttttttctgcgcgtaatctgctgcttgcaaacaaaaaaaccaccgctaccagcggtggtttgtttgccggatcaagagctaccaactctttttccgaaggtaactggcttcagcagagcgcagataccaaatactgtccttctagtgtagccgtagttaggccaccacttcaagaactctgtagcaccgcctacatacctcgctctgctaatcctgttaccagtggctgctgccagtggcgataagtcgtgtcttaccgggttggactcaagacgatagttaccggataaggcgcagcggtcgggctgaacggggggttcgtgcacacagcccagcttggagcgaacgacctacaccgaactgagatacctacagcgtgagctatgagaaagcgccacgcttcccgaagggagaaaggcggacaggtatccggtaagcggcagggtcggaacaggagagcgcacgagggagcttccagggggaaacgcctggtatctttatagtcctgtcgggtttcgccacctctgacttgagcgtcgatttttgtgatgctcgtcaggggggcggagcctatggaaaaacgccagcaacgcggcctttttacggttcctggccttttgctggccttttgctcacatgttctttcctgcgttatcccctgattctgtggataaccgtattaccgcctttgagtgagctgataccgctcgccgcagccgaacgaccgagcgcagcgagtcagtgagcgaggaagcggaagagcgcctgatgcggtattttctccttacgcatctgtgcggtatttcacaccgcatatatggtgcactctcagtacaatctgctctgatgccgcatagttaagccagtatacactccgctatcgctacgtgactgggtcatggctgcgccccgacacccgccaacacccgctgacgcgccctgacgggcttgtctgctcccggcatccgcttacagacaagctgtgaccgtctccgggagctgcatgtgtcagaggttttcaccgtcatcaccgaaacgcgcgaggcagctgcggtaaagctcatcagcgtggtcgtgaagcgattcacagatgtctgcctgttcatccgcgtccagctcgttgagtttctccagaagcgttaatgtctggcttctgataaagcgggccatgttaagggcggttttttcctgtttggtcactgatgcctccgtgtaagggggatttctgttcatgggggtaatgataccgatgaaacgagagaggatgctcacgatacgggttactgatgatgaacatgcccggttactggaacgttgtgagggtaaacaactggcggtatggatgcggcgggaccagagaaaaatcactcagggtcaatgccagcgcttcgttaatacagatgtaggtgttccacagggtagccagcagcatcctgcgatgcagatccggaacataatggtgcagggcgctgacttccgcgtttccagactttacgaaacacggaaaccgaagaccattcatgttgttgctcaggtcgcagacgttttgcagcagcagtcgcttcacgttcgctcgcgtatcggtgattcattctgctaaccagtaaggcaaccccgccagcctagccgggtcctcaacgacaggagcacgatcatgctagtcatgccccgcgcccaccggaaggagctgactgggttgaaggctctcaagggcatcggtcgagatcccggtgcctaatgagtgagctaacttacattaattgcgttgcgctcactgcccgctttccagtcgggaaacctgtcgtgccagctgcattaatgaatcggccaacgcgcggggagaggcggtttgcgtattgggcgccagggtggtttttcttttcaccagtgagacgggcaacagctgattgcccttcaccgcctggccctgagagagttgcagcaagcggtccacgctggtttgccccagcaggcgaaaatcctgtttgatggtggttaacggcgggatataacatgagctgtcttcggtatcgtcgtatcccactaccgagatgtccgcaccaacgcgcagcccggactcggtaatggcgcgcattgcgcccagcgccatctgatcgttggcaaccagcatcgcagtgggaacgatgccctcattcagcatttgcatggtttgttgaaaaccggacatggcactccagtcgccttcccgttccgctatcggctgaatttgattgcgagtgagatatttatgccagccagccagacgcagacgcgccgagacagaacttaatgggcccgctaacagcgcgatttgctggtgacccaatgcgaccagatgctccacgcccagtcgcgtaccgtcttcatgggagaaaataatactgttgatgggtgtctggtcagagacatcaagaaataacgccggaacattagtgcaggcagcttccacagcaatggcatcctggtcatccagcggatagttaatgatcagcccactgacgcgttgcgcgagaagattgtgcaccgccgctttacaggcttcgacgccgcttcgttctaccatcgacaccaccacgctggcacccagttgatcggcgcgagatttaatcgccgcgacaatttgcgacggcgcgtgcagggccagactggaggtggcaacgccaatcagcaacgactgtttgcccgccagttgttgtgccacgcggttgggaatgtaattcagctccgccatcgccgcttccactttttcccgcgttttcgcagaaacgtggctggcctggttcaccacgcgggaaacggtctgataagagacaccggcatactctgcgacatcgtataacgttactggtttcacattcaccaccctgaattgactctcttccgggcgctatcatgccataccgcgaaaggttttgcgccattcgatggtgtccgggatctcgacgctctcccttatgcgactcctgcattaggaagcagcccagtagtaggttgaggccgttgagcaccgccgccgcaaggaatggtgcatgcaaggagatggcgcccaacagtcccccggccacggggcctgccaccatacccacgccgaaacaagcgctcatgagcccgaagtggcgagcccgatcttccccatcggtgatgtcggcgatataggcgccagcaaccgcacctgtggcgccggtgatgccggccacgatgcgtccggcgtagaggatcgagatcgatctcgatcccgcgaaattaatacgactcactataggggaattgtgagcggataacaattcccctctagaaataattttgtttaactttaagaaggagatatacatatgcaccaccaccaccaccacggctatggccgcaaaaaacgccgccagcgccgccgcggctatccgtatgatgtgccggattatgccccatgccagccgatgaaacgtctgaccctgggcaacgatatcatgccgaaaaagaaacgtaaagtggggctcgagcccggggagaagccgtacaagtgccctgaatgtggtaagtcattttcgagaagtgatgaattagtaagacaccagcggactcataccggggagaagccgtacaagtgccctgaatgtggtaagtcattttcgagaagtgatgaattagtaagacaccagcggactcataccggggagaagccctataaatgtccagaatgtggaaagtcctttagcacgtcagggaacttagtaagacaccagcgaactcataccggggaaaagccttacaaatgccccgaatgtgggaagagtttcagccggtctgataagctgaccgaacaccagagaactcataccggggagaagccctataaatgccctgaatgtggcaagagcttcagtactagcgggaatctcactgaacatcagcgaactcataccggggaaaaaccttacaagtgccctgagtgcggcaagagcttctctcaatcaagttcattagtaagacaccagaggactcataccggtggcggcagcggcggcagcgaattcgggcgcgccgacgcgctggacgatttcgatctcgacatgctgggttctgatgccctcgatgactttgacctggatatgttgggaagcgacgcattggatgactttgatctggacatgctcggctccgatgctctggacgatttcgatctcgatatgttaattaacggatccgagcagaaactcatctctgaagaagatctggaacaaaagttgatttcagaagaagatctggaacagaagctcatctctgaggaagatctgtaagcggccgcactcgagcaccaccaccaccaccaccaccactaattgattaatacctaggctgctaaacaaagcccgaaaggaagctgagttggctgctgccaccgctgagcaataactagcataaccccttggggcctctaaacgggtcttgaggggttttttgctgaaaggaggaactatatccggat

SEQ ID NO: 294 - DNA, 5986 bp, Artificial Sequence
  synthetic construct
tggcgaatgggacgcgccctgtagcggcgcattaagcgcggcgggtgtggtggttacgcgcagcgtgaccgctacacttgccagcgccctagcgcccgctcctttcgctttcttcccttcctttctcgccacgttcgccggctttccccgtcaagctctaaatcgggggctccctttagggttccgatttagtgctttacggcacctcgaccccaaaaaacttgattagggtgatggttcacgtagtgggccatcgccctgatagacggtttttcgccctttgacgttggagtccacgttctttaatagtggactcttgttccaaactggaacaacactcaaccctatctcggtctattcttttgatttataagggattttgccgatttcggcctattggttaaaaaatgagctgatttaacaaaaatttaacgcgaattttaacaaaatattaacgtttacaatttcaggtggcacttttcggggaaatgtgcgcggaacccctatttgtttatttttctaaatacattcaaatatgtatccgctcatgaattaattcttagaaaaactcatcgagcatcaaatgaaactgcaatttattcatatcaggattatcaataccatatttttgaaaaagccgtttctgtaatgaaggagaaaactcaccgaggcagttccataggatggcaagatcctggtatcggtctgcgattccgactcgtccaacatcaatacaacctattaatttcccctcgtcaaaaataaggttatcaagtgagaaatcaccatgagtgacgactgaatccggtgagaatggcaaaagtttatgcatttctttccagacttgttcaacaggccagccattacgctcgtcatcaaaatcactcgcatcaaccaaaccgttattcattcgtgattgcgcctgagcgagacgaaatacgcgatcgctgttaaaaggacaattacaaacaggaatcgaatgcaaccggcgcaggaacactgccagcgcatcaacaatattttcacctgaatcaggatattcttctaatacctggaatgctgttttcccggggatcgcagtggtgagtaaccatgcatcatcaggagtacggataaaatgcttgatggtcggaagaggcataaattccgtcagccagtttagtctgaccatctcatctgtaacatcattggcaacgctacctttgccatgtttcagaaacaactctggcgcatcgggcttcccatacaatcgatagattgtcgcacctgattgcccgacattatcgcgagcccatttatacccatataaatcagcatccatgttggaatttaatcgcggcctagagcaagacgtttcccgttgaatatggctcataacaccccttgtattactgtttatgtaagcagacagttttattgttcatgaccaaaatcccttaacgtgagttttcgttccactgagcgtcagaccccgtagaaaagatcaaaggatcttcttgagatcctttttttctgcgcgtaatctgctgcttgcaaacaaaaaaaccaccgctaccagcggtggtttgtttgccggatcaagagctaccaactctttttccgaaggtaactggcttcagcagagcgcagataccaaatactgtccttctagtgtagccgtagttaggccaccacttcaagaactctgtagcaccgcctacatacctcgctctgctaatcctgttaccagtggctgctgccagtggcgataagtcgtgtcttaccgggttggactcaagacgatagttaccggataaggcgcagcggtcgggctgaacggggggttcgtgcacacagcccagcttggagcgaacgacctacaccgaactgagatacctacagcgtgagctatgagaaagcgccacgcttcccgaagggagaaaggcggacaggtatccggtaagcggcagggtcggaacaggagagcgcacgagggagcttccagggggaaacgcctggtatctttatagtcctgtcgggtttcgccacctctgacttgagcgtcgatttttgtgatgctcgtcaggggggcggagcctatggaaaaacgccagcaacgcggcctttttacggttcctggccttttgctggccttttgctcacatgttctttcctgcgttatcccctgattctgtggataaccgtattaccgcctttgagtgagctgataccgctcgccgcagccgaacgaccgagcgcagcgagtcagtgagcgaggaagcggaagagcgcctgatgcggtattttctccttacgcatctgtgcggtatttcacaccgcatatatggtgcactctcagtacaatctgctctgatgccgcatagttaagccagtatacactccgctatcgctacgtgactgggtcatggctgcgccccgacacccgccaacacccgctgacgcgccctgacgggcttgtctgctcccggcatccgcttacagacaagctgtgaccgtctccgggagctgcatgtgtcagaggttttcaccgtcatcaccgaaacgcgcgaggcagctgcggtaaagctcatcagcgtggtcgtgaagcgattcacagatgtctgcctgttcatccgcgtccagctcgttgagtttctccagaagcgttaatgtctggcttctgataaagcgggccatgttaagggcggttttttcctgtttggtcactgatgcctccgtgtaagggggatttctgttcatgggggtaatgataccgatgaaacgagagaggatgctcacgatacgggttactgatgatgaacatgcccggttactggaacgttgtgagggtaaacaactggcggtatggatgcggcgggaccagagaaaaatcactcagggtcaatgccagcgcttcgttaatacagatgtaggtgttccacagggtagccagcagcatcctgcgatgcagatccggaacataatggtgcagggcgctgacttccgcgtttccagactttacgaaacacggaaaccgaagaccattcatgttgttgctcaggtcgcagacgttttgcagcagcagtcgcttcacgttcgctcgcgtatcggtgattcattctgctaaccagtaaggcaaccccgccagcctagccgggtcctcaacgacaggagcacgatcatgctagtcatgccccgcgcccaccggaaggagctgactgggttgaaggctctcaagggcatcggtcgagatcccggtgcctaatgagtgagctaacttacattaattgcgttgcgctcactgcccgctttccagtcgggaaacctgtcgtgccagctgcattaatgaatcggccaacgcgcggggagaggcggtttgcgtattgggcgccagggtggtttttcttttcaccagtgagacgggcaacagctgattgcccttcaccgcctggccctgagagagttgcagcaagcggtccacgctggtttgccccagcaggcgaaaatcctgtttgatggtggttaacggcgggatataacatgagctgtcttcggtatcgtcgtatcccactaccgagatgtccgcaccaacgcgcagcccggactcggtaatggcgcgcattgcgcccagcgccatctgatcgttggcaaccagcatcgcagtgggaacgatgccctcattcagcatttgcatggtttgttgaaaaccggacatggcactccagtcgccttcccgttccgctatcggctgaatttgattgcgagtgagatatttatgccagccagccagacgcagacgcgccgagacagaacttaatgggcccgctaacagcgcgatttgctggtgacccaatgcgaccagatgctccacgcccagtcgcgtaccgtcttcatgggagaaaataatactgttgatgggtgtctggtcagagacatcaagaaataacgccggaacattagtgcaggcagcttccacagcaatggcatcctggtcatccagcggatagttaatgatcagcccactgacgcgttgcgcgagaagattgtgcaccgccgctttacaggcttcgacgccgcttcgttctaccatcgacaccaccacgctggcacccagttgatcggcgcgagatttaatcgccgcgacaatttgcgacggcgcgtgcagggccagactggaggtggcaacgccaatcagcaacgactgtttgcccgccagttgttgtgccacgcggttgggaatgtaattcagctccgccatcgccgcttccactttttcccgcgttttcgcagaaacgtggctggcctggttcaccacgcgggaaacggtctgataagagacaccggcatactctgcgacatcgtataacgttactggtttcacattcaccaccctgaattgactctcttccgggcgctatcatgccataccgcgaaaggttttgcgccattcgatggtgtccgggatctcgacgctctcccttatgcgactcctgcattaggaagcagcccagtagtaggttgaggccgttgagcaccgccgccgcaaggaatggtgcatgcaaggagatggcgcccaacagtcccccggccacggggcctgccaccatacccacgccgaaacaagcgctcatgagcccgaagtggcgagcccgatcttccccatcggtgatgtcggcgatataggcgccagcaaccgcacctgtggcgccggtgatgccggccacgatgcgtccggcgtagaggatcgagatcgatctcgatcccgcgaaattaatacgactcactataggggaattgtgagcggataacaattcccctctagaaataattttgtttaactttaagaaggagatatacatatgcaccaccaccaccaccacggctatggccgcaaaaaacgccgccagcgccgccgcggctatccgtatgatgtgccggattatgccccatgccagccgatgaaacgtctgaccctgggcaacgatatcatgccgaaaaagaaacgtaaagtggggctcgagcccggggagaaaccttataaatgcccagaatgcgggaaatcgttcagtcaaagagcacatttagaaagacatcaacggacccacaccggggaaaagccatataaatgccccgagtgcggcaaatcattcagccaaagtagcaacttagtaagacaccagcgcacccataccggggaaaagccctacaagtgtcctgagtgcggaaagtctttctccactagcggttcattagtaagacaccagaggacacacaccggggaaaaaccttacaagtgccctgagtgcggcaagagcttctctcaatcaagttcattagtaagacaccagaggactcataccggggagaagccatacaaatgccctgagtgtggaaagtcatttagccagcgagctaatctgcgggcccaccagcggacccacaccggggaaaagccatataaatgccccgagtgcggcaaatcattcagccaaagtagcaacttagtaagacaccagcgcacccataccggtggcggcagcggcggcagcgaattcgggcgcgccgacgcgctggacgatttcgatctcgacatgctgggttctgatgccctcgatgactttgacctggatatgttgggaagcgacgcattggatgactttgatctggacatgctcggctccgatgctctggacgatttcgatctcgatatgttaattaacggatccgagcagaaactcatctctgaagaagatctggaacaaaagttgatttcagaagaagatctggaacagaagctcatctctgaggaagatctgtaagcggccgcactcgagcaccaccaccaccaccaccaccactaattgattaatacctaggctgctaaacaaagcccgaaaggaagctgagttggctgctgccaccgctgagcaataactagcataaccccttggggcctctaaacgggtcttgaggggttttttgctgaaaggaggaactatatccggat

SEQ ID NO: 295 - DNA, 5986 bp, Artificial Sequence
  synthetic contruct
tggcgaatgggacgcgccctgtagcggcgcattaagcgcggcgggtgtggtggttacgcgcagcgtgaccgctacacttgccagcgccctagcgcccgctcctttcgctttcttcccttcctttctcgccacgttcgccggctttccccgtcaagctctaaatcgggggctccctttagggttccgatttagtgctttacggcacctcgaccccaaaaaacttgattagggtgatggttcacgtagtgggccatcgccctgatagacggtttttcgccctttgacgttggagtccacgttctttaatagtggactcttgttccaaactggaacaacactcaaccctatctcggtctattcttttgatttataagggattttgccgatttcggcctattggttaaaaaatgagctgatttaacaaaaatttaacgcgaattttaacaaaatattaacgtttacaatttcaggtggcacttttcggggaaatgtgcgcggaacccctatttgtttatttttctaaatacattcaaatatgtatccgctcatgaattaattcttagaaaaactcatcgagcatcaaatgaaactgcaatttattcatatcaggattatcaataccatatttttgaaaaagccgtttctgtaatgaaggagaaaactcaccgaggcagttccataggatggcaagatcctggtatcggtctgcgattccgactcgtccaacatcaatacaacctattaatttcccctcgtcaaaaataaggttatcaagtgagaaatcaccatgagtgacgactgaatccggtgagaatggcaaaagtttatgcatttctttccagacttgttcaacaggccagccattacgctcgtcatcaaaatcactcgcatcaaccaaaccgttattcattcgtgattgcgcctgagcgagacgaaatacgcgatcgctgttaaaaggacaattacaaacaggaatcgaatgcaaccggcgcaggaacactgccagcgcatcaacaatattttcacctgaatcaggatattcttctaatacctggaatgctgttttcccggggatcgcagtggtgagtaaccatgcatcatcaggagtacggataaaatgcttgatggtcggaagaggcataaattccgtcagccagtttagtctgaccatctcatctgtaacatcattggcaacgctacctttgccatgtttcagaaacaactctggcgcatcgggcttcccatacaatcgatagattgtcgcacctgattgcccgacattatcgcgagcccatttatacccatataaatcagcatccatgttggaatttaatcgcggcctagagcaagacgtttcccgttgaatatggctcataacaccccttgtattactgtttatgtaagcagacagttttattgttcatgaccaaaatcccttaacgtgagttttcgttccactgagcgtcagaccccgtagaaaagatcaaaggatcttcttgagatcctttttttctgcgcgtaatctgctgcttgcaaacaaaaaaaccaccgctaccagcggtggtttgtttgccggatcaagagctaccaactctttttccgaaggtaactggcttcagcagagcgcagataccaaatactgtccttctagtgtagccgtagttaggccaccacttcaagaactctgtagcaccgcctacatacctcgctctgctaatcctgttaccagtggctgctgccagtggcgataagtcgtgtcttaccgggttggactcaagacgatagttaccggataaggcgcagcggtcgggctgaacggggggttcgtgcacacagcccagcttggagcgaacgacctacaccgaactgagatacctacagcgtgagctatgagaaagcgccacgcttcccgaagggagaaaggcggacaggtatccggtaagcggcagggtcggaacaggagagcgcacgagggagcttccagggggaaacgcctggtatctttatagtcctgtcgggtttcgccacctctgacttgagcgtcgatttttgtgatgctcgtcaggggggcggagcctatggaaaaacgccagcaacgcggcctttttacggttcctggccttttgctggccttttgctcacatgttctttcctgcgttatcccctgattctgtggataaccgtattaccgcctttgagtgagctgataccgctcgccgcagccgaacgaccgagcgcagcgagtcagtgagcgaggaagcggaagagcgcctgatgcggtattttctccttacgcatctgtgcggtatttcacaccgcatatatggtgcactctcagtacaatctgctctgatgccgcatagttaagccagtatacactccgctatcgctacgtgactgggtcatggctgcgccccgacacccgccaacacccgctgacgcgccctgacgggcttgtctgctcccggcatccgcttacagacaagctgtgaccgtctccgggagctgcatgtgtcagaggttttcaccgtcatcaccgaaacgcgcgaggcagctgcggtaaagctcatcagcgtggtcgtgaagcgattcacagatgtctgcctgttcatccgcgtccagctcgttgagtttctccagaagcgttaatgtctggcttctgataaagcgggccatgttaagggcggttttttcctgtttggtcactgatgcctccgtgtaagggggatttctgttcatgggggtaatgataccgatgaaacgagagaggatgctcacgatacgggttactgatgatgaacatgcccggttactggaacgttgtgagggtaaacaactggcggtatggatgcggcgggaccagagaaaaatcactcagggtcaatgccagcgcttcgttaatacagatgtaggtgttccacagggtagccagcagcatcctgcgatgcagatccggaacataatggtgcagggcgctgacttccgcgtttccagactttacgaaacacggaaaccgaagaccattcatgttgttgctcaggtcgcagacgttttgcagcagcagtcgcttcacgttcgctcgcgtatcggtgattcattctgctaaccagtaaggcaaccccgccagcctagccgggtcctcaacgacaggagcacgatcatgctagtcatgccccgcgcccaccggaaggagctgactgggttgaaggctctcaagggcatcggtcgagatcccggtgcctaatgagtgagctaacttacattaattgcgttgcgctcactgcccgctttccagtcgggaaacctgtcgtgccagctgcattaatgaatcggccaacgcgcggggagaggcggtttgcgtattgggcgccagggtggtttttcttttcaccagtgagacgggcaacagctgattgcccttcaccgcctggccctgagagagttgcagcaagcggtccacgctggtttgccccagcaggcgaaaatcctgtttgatggtggttaacggcgggatataacatgagctgtcttcggtatcgtcgtatcccactaccgagatgtccgcaccaacgcgcagcccggactcggtaatggcgcgcattgcgcccagcgccatctgatcgttggcaaccagcatcgcagtgggaacgatgccctcattcagcatttgcatggtttgttgaaaaccggacatggcactccagtcgccttcccgttccgctatcggctgaatttgattgcgagtgagatatttatgccagccagccagacgcagacgcgccgagacagaacttaatgggcccgctaacagcgcgatttgctggtgacccaatgcgaccagatgctccacgcccagtcgcgtaccgtcttcatgggagaaaataatactgttgatgggtgtctggtcagagacatcaagaaataacgccggaacattagtgcaggcagcttccacagcaatggcatcctggtcatccagcggatagttaatgatcagcccactgacgcgttgcgcgagaagattgtgcaccgccgctttacaggcttcgacgccgcttcgttctaccatcgacaccaccacgctggcacccagttgatcggcgcgagatttaatcgccgcgacaatttgcgacggcgcgtgcagggccagactggaggtggcaacgccaatcagcaacgactgtttgcccgccagttgttgtgccacgcggttgggaatgtaattcagctccgccatcgccgcttccactttttcccgcgttttcgcagaaacgtggctggcctggttcaccacgcgggaaacggtctgataagagacaccggcatactctgcgacatcgtataacgttactggtttcacattcaccaccctgaattgactctcttccgggcgctatcatgccataccgcgaaaggttttgcgccattcgatggtgtccgggatctcgacgctctcccttatgcgactcctgcattaggaagcagcccagtagtaggttgaggccgttgagcaccgccgccgcaaggaatggtgcatgcaaggagatggcgcccaacagtcccccggccacggggcctgccaccatacccacgccgaaacaagcgctcatgagcccgaagtggcgagcccgatcttccccatcggtgatgtcggcgatataggcgccagcaaccgcacctgtggcgccggtgatgccggccacgatgcgtccggcgtagaggatcgagatcgatctcgatcccgcgaaattaatacgactcactataggggaattgtgagcggataacaattcccctctagaaataattttgtttaactttaagaaggagatatacatatgcaccaccaccaccaccacggctatggccgcaaaaaacgccgccagcgccgccgcggctatccgtatgatgtgccggattatgccccatgccagccgatgaaacgtctgaccctgggcaacgatatcatgccgaaaaagaaacgtaaagtggggctcgagcccggggagaaaccatacaaatgtcccgaatgtggcaagagtttcagcagtaaaaagcatctcgctgagcatcagagaactcacaccggggaaaaaccttacaagtgccctgagtgcggcaagagcttctctcaatcaagttcattagtaagacaccagaggactcataccggggaaaaaccgtacaagtgtcctgagtgcgggaagagtttctccgatccgggccacttagtaagacatcagaggacacataccggggagaaaccttataaatgcccagaatgcgggaaatcgttcagtcaaagagcacatttagaaagacatcaacggacccacaccggggaaaagccctacaagtgtcctgagtgcggaaagtctttctccactagcggttcattagtaagacaccagaggacacacaccggggaaaaaccttacaagtgccctgagtgcggcaagagcttctctcaatcaagttcattagtaagacaccagaggactcataccggtggcggcagcggcggcagcgaattcgggcgcgccgacgcgctggacgatttcgatctcgacatgctgggttctgatgccctcgatgactttgacctggatatgttgggaagcgacgcattggatgactttgatctggacatgctcggctccgatgctctggacgatttcgatctcgatatgttaattaacggatccgagcagaaactcatctctgaagaagatctggaacaaaagttgatttcagaagaagatctggaacagaagctcatctctgaggaagatctgtaagcggccgcactcgagcaccaccaccaccaccaccaccactaattgattaatacctaggctgctaaacaaagcccgaaaggaagctgagttggctgctgccaccgctgagcaataactagcataaccccttggggcctctaaacgggtcttgaggggttttttgctgaaaggaggaactatatccggat

SEQ ID NO: 296 - DNA, 5986 bp, Artificial Sequence
  synthetic construct
tggcgaatgggacgcgccctgtagcggcgcattaagcgcggcgggtgtggtggttacgcgcagcgtgaccgctacacttgccagcgccctagcgcccgctcctttcgctttcttcccttcctttctcgccacgttcgccggctttccccgtcaagctctaaatcgggggctccctttagggttccgatttagtgctttacggcacctcgaccccaaaaaacttgattagggtgatggttcacgtagtgggccatcgccctgatagacggtttttcgccctttgacgttggagtccacgttctttaatagtggactcttgttccaaactggaacaacactcaaccctatctcggtctattcttttgatttataagggattttgccgatttcggcctattggttaaaaaatgagctgatttaacaaaaatttaacgcgaattttaacaaaatattaacgtttacaatttcaggtggcacttttcggggaaatgtgcgcggaacccctatttgtttatttttctaaatacattcaaatatgtatccgctcatgaattaattcttagaaaaactcatcgagcatcaaatgaaactgcaatttattcatatcaggattatcaataccatatttttgaaaaagccgtttctgtaatgaaggagaaaactcaccgaggcagttccataggatggcaagatcctggtatcggtctgcgattccgactcgtccaacatcaatacaacctattaatttcccctcgtcaaaaataaggttatcaagtgagaaatcaccatgagtgacgactgaatccggtgagaatggcaaaagtttatgcatttctttccagacttgttcaacaggccagccattacgctcgtcatcaaaatcactcgcatcaaccaaaccgttattcattcgtgattgcgcctgagcgagacgaaatacgcgatcgctgttaaaaggacaattacaaacaggaatcgaatgcaaccggcgcaggaacactgccagcgcatcaacaatattttcacctgaatcaggatattcttctaatacctggaatgctgttttcccggggatcgcagtggtgagtaaccatgcatcatcaggagtacggataaaatgcttgatggtcggaagaggcataaattccgtcagccagtttagtctgaccatctcatctgtaacatcattggcaacgctacctttgccatgtttcagaaacaactctggcgcatcgggcttcccatacaatcgatagattgtcgcacctgattgcccgacattatcgcgagcccatttatacccatataaatcagcatccatgttggaatttaatcgcggcctagagcaagacgtttcccgttgaatatggctcataacaccccttgtattactgtttatgtaagcagacagttttattgttcatgaccaaaatcccttaacgtgagttttcgttccactgagcgtcagaccccgtagaaaagatcaaaggatcttcttgagatcctttttttctgcgcgtaatctgctgcttgcaaacaaaaaaaccaccgctaccagcggtggtttgtttgccggatcaagagctaccaactctttttccgaaggtaactggcttcagcagagcgcagataccaaatactgtccttctagtgtagccgtagttaggccaccacttcaagaactctgtagcaccgcctacatacctcgctctgctaatcctgttaccagtggctgctgccagtggcgataagtcgtgtcttaccgggttggactcaagacgatagttaccggataaggcgcagcggtcgggctgaacggggggttcgtgcacacagcccagcttggagcgaacgacctacaccgaactgagatacctacagcgtgagctatgagaaagcgccacgcttcccgaagggagaaaggcggacaggtatccggtaagcggcagggtcggaacaggagagcgcacgagggagcttccagggggaaacgcctggtatctttatagtcctgtcgggtttcgccacctctgacttgagcgtcgatttttgtgatgctcgtcaggggggcggagcctatggaaaaacgccagcaacgcggcctttttacggttcctggccttttgctggccttttgctcacatgttctttcctgcgttatcccctgattctgtggataaccgtattaccgcctttgagtgagctgataccgctcgccgcagccgaacgaccgagcgcagcgagtcagtgagcgaggaagcggaagagcgcctgatgcggtattttctccttacgcatctgtgcggtatttcacaccgcatatatggtgcactctcagtacaatctgctctgatgccgcatagttaagccagtatacactccgctatcgctacgtgactgggtcatggctgcgccccgacacccgccaacacccgctgacgcgccctgacgggcttgtctgctcccggcatccgcttacagacaagctgtgaccgtctccgggagctgcatgtgtcagaggttttcaccgtcatcaccgaaacgcgcgaggcagctgcggtaaagctcatcagcgtggtcgtgaagcgattcacagatgtctgcctgttcatccgcgtccagctcgttgagtttctccagaagcgttaatgtctggcttctgataaagcgggccatgttaagggcggttttttcctgtttggtcactgatgcctccgtgtaagggggatttctgttcatgggggtaatgataccgatgaaacgagagaggatgctcacgatacgggttactgatgatgaacatgcccggttactggaacgttgtgagggtaaacaactggcggtatggatgcggcgggaccagagaaaaatcactcagggtcaatgccagcgcttcgttaatacagatgtaggtgttccacagggtagccagcagcatcctgcgatgcagatccggaacataatggtgcagggcgctgacttccgcgtttccagactttacgaaacacggaaaccgaagaccattcatgttgttgctcaggtcgcagacgttttgcagcagcagtcgcttcacgttcgctcgcgtatcggtgattcattctgctaaccagtaaggcaaccccgccagcctagccgggtcctcaacgacaggagcacgatcatgctagtcatgccccgcgcccaccggaaggagctgactgggttgaaggctctcaagggcatcggtcgagatcccggtgcctaatgagtgagctaacttacattaattgcgttgcgctcactgcccgctttccagtcgggaaacctgtcgtgccagctgcattaatgaatcggccaacgcgcggggagaggcggtttgcgtattgggcgccagggtggtttttcttttcaccagtgagacgggcaacagctgattgcccttcaccgcctggccctgagagagttgcagcaagcggtccacgctggtttgccccagcaggcgaaaatcctgtttgatggtggttaacggcgggatataacatgagctgtcttcggtatcgtcgtatcccactaccgagatgtccgcaccaacgcgcagcccggactcggtaatggcgcgcattgcgcccagcgccatctgatcgttggcaaccagcatcgcagtgggaacgatgccctcattcagcatttgcatggtttgttgaaaaccggacatggcactccagtcgccttcccgttccgctatcggctgaatttgattgcgagtgagatatttatgccagccagccagacgcagacgcgccgagacagaacttaatgggcccgctaacagcgcgatttgctggtgacccaatgcgaccagatgctccacgcccagtcgcgtaccgtcttcatgggagaaaataatactgttgatgggtgtctggtcagagacatcaagaaataacgccggaacattagtgcaggcagcttccacagcaatggcatcctggtcatccagcggatagttaatgatcagcccactgacgcgttgcgcgagaagattgtgcaccgccgctttacaggcttcgacgccgcttcgttctaccatcgacaccaccacgctggcacccagttgatcggcgcgagatttaatcgccgcgacaatttgcgacggcgcgtgcagggccagactggaggtggcaacgccaatcagcaacgactgtttgcccgccagttgttgtgccacgcggttgggaatgtaattcagctccgccatcgccgcttccactttttcccgcgttttcgcagaaacgtggctggcctggttcaccacgcgggaaacggtctgataagagacaccggcatactctgcgacatcgtataacgttactggtttcacattcaccaccctgaattgactctcttccgggcgctatcatgccataccgcgaaaggttttgcgccattcgatggtgtccgggatctcgacgctctcccttatgcgactcctgcattaggaagcagcccagtagtaggttgaggccgttgagcaccgccgccgcaaggaatggtgcatgcaaggagatggcgcccaacagtcccccggccacggggcctgccaccatacccacgccgaaacaagcgctcatgagcccgaagtggcgagcccgatcttccccatcggtgatgtcggcgatataggcgccagcaaccgcacctgtggcgccggtgatgccggccacgatgcgtccggcgtagaggatcgagatcgatctcgatcccgcgaaattaatacgactcactataggggaattgtgagcggataacaattcccctctagaaataattttgtttaactttaagaaggagatatacatatgcaccaccaccaccaccacggctatggccgcaaaaaacgccgccagcgccgccgcggctatccgtatgatgtgccggattatgccccatgccagccgatgaaacgtctgaccctgggcaacgatatcatgccgaaaaagaaacgtaaagtggggctcgagcccggggaaaagccctacaaatgccccgaatgtggtaagtctttttctaggaacgacaccttgacagaacaccagcggacccacaccggggaaaagccctacaagtgtcctgagtgcggaaagtctttctccactagcggttcattagtaagacaccagaggacacacaccggggaaaaaccgtacaagtgtcctgagtgcgggaagagtttctccgatccgggccacttagtaagacatcagaggacacataccggggagaaaccttataaatgcccagaatgcgggaaatcgttcagtcaaagagcacatttagaaagacatcaacggacccacaccggggaaaagccctacaagtgtcctgagtgcggaaagtctttctccactagcggttcattagtaagacaccagaggacacacaccggggaaaaaccttacaagtgccctgagtgcggcaagagcttctctcaatcaagttcattagtaagacaccagaggactcataccggtggcggcagcggcggcagcgaattcgggcgcgccgacgcgctggacgatttcgatctcgacatgctgggttctgatgccctcgatgactttgacctggatatgttgggaagcgacgcattggatgactttgatctggacatgctcggctccgatgctctggacgatttcgatctcgatatgttaattaacggatccgagcagaaactcatctctgaagaagatctggaacaaaagttgatttcagaagaagatctggaacagaagctcatctctgaggaagatctgtaagcggccgcactcgagcaccaccaccaccaccaccaccactaattgattaatacctaggctgctaaacaaagcccgaaaggaagctgagttggctgctgccaccgctgagcaataactagcataaccccttggggcctctaaacgggtcttgaggggttttttgctgaaaggaggaactatatccggat

SEQ ID NO: 297 - DNA, 5986 bp, Artificial Sequence
  synthetic construct
tggcgaatgggacgcgccctgtagcggcgcattaagcgcggcgggtgtggtggttacgcgcagcgtgaccgctacacttgccagcgccctagcgcccgctcctttcgctttcttcccttcctttctcgccacgttcgccggctttccccgtcaagctctaaatcgggggctccctttagggttccgatttagtgctttacggcacctcgaccccaaaaaacttgattagggtgatggttcacgtagtgggccatcgccctgatagacggtttttcgccctttgacgttggagtccacgttctttaatagtggactcttgttccaaactggaacaacactcaaccctatctcggtctattcttttgatttataagggattttgccgatttcggcctattggttaaaaaatgagctgatttaacaaaaatttaacgcgaattttaacaaaatattaacgtttacaatttcaggtggcacttttcggggaaatgtgcgcggaacccctatttgtttatttttctaaatacattcaaatatgtatccgctcatgaattaattcttagaaaaactcatcgagcatcaaatgaaactgcaatttattcatatcaggattatcaataccatatttttgaaaaagccgtttctgtaatgaaggagaaaactcaccgaggcagttccataggatggcaagatcctggtatcggtctgcgattccgactcgtccaacatcaatacaacctattaatttcccctcgtcaaaaataaggttatcaagtgagaaatcaccatgagtgacgactgaatccggtgagaatggcaaaagtttatgcatttctttccagacttgttcaacaggccagccattacgctcgtcatcaaaatcactcgcatcaaccaaaccgttattcattcgtgattgcgcctgagcgagacgaaatacgcgatcgctgttaaaaggacaattacaaacaggaatcgaatgcaaccggcgcaggaacactgccagcgcatcaacaatattttcacctgaatcaggatattcttctaatacctggaatgctgttttcccggggatcgcagtggtgagtaaccatgcatcatcaggagtacggataaaatgcttgatggtcggaagaggcataaattccgtcagccagtttagtctgaccatctcatctgtaacatcattggcaacgctacctttgccatgtttcagaaacaactctggcgcatcgggcttcccatacaatcgatagattgtcgcacctgattgcccgacattatcgcgagcccatttatacccatataaatcagcatccatgttggaatttaatcgcggcctagagcaagacgtttcccgttgaatatggctcataacaccccttgtattactgtttatgtaagcagacagttttattgttcatgaccaaaatcccttaacgtgagttttcgttccactgagcgtcagaccccgtagaaaagatcaaaggatcttcttgagatcctttttttctgcgcgtaatctgctgcttgcaaacaaaaaaaccaccgctaccagcggtggtttgtttgccggatcaagagctaccaactctttttccgaaggtaactggcttcagcagagcgcagataccaaatactgtccttctagtgtagccgtagttaggccaccacttcaagaactctgtagcaccgcctacatacctcgctctgctaatcctgttaccagtggctgctgccagtggcgataagtcgtgtcttaccgggttggactcaagacgatagttaccggataaggcgcagcggtcgggctgaacggggggttcgtgcacacagcccagcttggagcgaacgacctacaccgaactgagatacctacagcgtgagctatgagaaagcgccacgcttcccgaagggagaaaggcggacaggtatccggtaagcggcagggtcggaacaggagagcgcacgagggagcttccagggggaaacgcctggtatctttatagtcctgtcgggtttcgccacctctgacttgagcgtcgatttttgtgatgctcgtcaggggggcggagcctatggaaaaacgccagcaacgcggcctttttacggttcctggccttttgctggccttttgctcacatgttctttcctgcgttatcccctgattctgtggataaccgtattaccgcctttgagtgagctgataccgctcgccgcagccgaacgaccgagcgcagcgagtcagtgagcgaggaagcggaagagcgcctgatgcggtattttctccttacgcatctgtgcggtatttcacaccgcatatatggtgcactctcagtacaatctgctctgatgccgcatagttaagccagtatacactccgctatcgctacgtgactgggtcatggctgcgccccgacacccgccaacacccgctgacgcgccctgacgggcttgtctgctcccggcatccgcttacagacaagctgtgaccgtctccgggagctgcatgtgtcagaggttttcaccgtcatcaccgaaacgcgcgaggcagctgcggtaaagctcatcagcgtggtcgtgaagcgattcacagatgtctgcctgttcatccgcgtccagctcgttgagtttctccagaagcgttaatgtctggcttctgataaagcgggccatgttaagggcggttttttcctgtttggtcactgatgcctccgtgtaagggggatttctgttcatgggggtaatgataccgatgaaacgagagaggatgctcacgatacgggttactgatgatgaacatgcccggttactggaacgttgtgagggtaaacaactggcggtatggatgcggcgggaccagagaaaaatcactcagggtcaatgccagcgcttcgttaatacagatgtaggtgttccacagggtagccagcagcatcctgcgatgcagatccggaacataatggtgcagggcgctgacttccgcgtttccagactttacgaaacacggaaaccgaagaccattcatgttgttgctcaggtcgcagacgttttgcagcagcagtcgcttcacgttcgctcgcgtatcggtgattcattctgctaaccagtaaggcaaccccgccagcctagccgggtcctcaacgacaggagcacgatcatgctagtcatgccccgcgcccaccggaaggagctgactgggttgaaggctctcaagggcatcggtcgagatcccggtgcctaatgagtgagctaacttacattaattgcgttgcgctcactgcccgctttccagtcgggaaacctgtcgtgccagctgcattaatgaatcggccaacgcgcggggagaggcggtttgcgtattgggcgccagggtggtttttcttttcaccagtgagacgggcaacagctgattgcccttcaccgcctggccctgagagagttgcagcaagcggtccacgctggtttgccccagcaggcgaaaatcctgtttgatggtggttaacggcgggatataacatgagctgtcttcggtatcgtcgtatcccactaccgagatgtccgcaccaacgcgcagcccggactcggtaatggcgcgcattgcgcccagcgccatctgatcgttggcaaccagcatcgcagtgggaacgatgccctcattcagcatttgcatggtttgttgaaaaccggacatggcactccagtcgccttcccgttccgctatcggctgaatttgattgcgagtgagatatttatgccagccagccagacgcagacgcgccgagacagaacttaatgggcccgctaacagcgcgatttgctggtgacccaatgcgaccagatgctccacgcccagtcgcgtaccgtcttcatgggagaaaataatactgttgatgggtgtctggtcagagacatcaagaaataacgccggaacattagtgcaggcagcttccacagcaatggcatcctggtcatccagcggatagttaatgatcagcccactgacgcgttgcgcgagaagattgtgcaccgccgctttacaggcttcgacgccgcttcgttctaccatcgacaccaccacgctggcacccagttgatcggcgcgagatttaatcgccgcgacaatttgcgacggcgcgtgcagggccagactggaggtggcaacgccaatcagcaacgactgtttgcccgccagttgttgtgccacgcggttgggaatgtaattcagctccgccatcgccgcttccactttttcccgcgttttcgcagaaacgtggctggcctggttcaccacgcgggaaacggtctgataagagacaccggcatactctgcgacatcgtataacgttactggtttcacattcaccaccctgaattgactctcttccgggcgctatcatgccataccgcgaaaggttttgcgccattcgatggtgtccgggatctcgacgctctcccttatgcgactcctgcattaggaagcagcccagtagtaggttgaggccgttgagcaccgccgccgcaaggaatggtgcatgcaaggagatggcgcccaacagtcccccggccacggggcctgccaccatacccacgccgaaacaagcgctcatgagcccgaagtggcgagcccgatcttccccatcggtgatgtcggcgatataggcgccagcaaccgcacctgtggcgccggtgatgccggccacgatgcgtccggcgtagaggatcgagatcgatctcgatcccgcgaaattaatacgactcactataggggaattgtgagcggataacaattcccctctagaaataattttgtttaactttaagaaggagatatacatatgcaccaccaccaccaccacggctatggccgcaaaaaacgccgccagcgccgccgcggctatccgtatgatgtgccggattatgccccatgccagccgatgaaacgtctgaccctgggcaacgatatcatgccgaaaaagaaacgtaaagtggggctcgagcccggggagaaaccatacaaatgtcccgaatgtggcaagagtttcagcagtaaaaagcatctcgctgagcatcagagaactcacaccggggaaaagccctacaagtgtcctgagtgcggaaagtctttctccactagcggttcattagtaagacaccagaggacacacaccggggagaaaccttataaatgcccagaatgcgggaaatcgttcagtcaaagagcacatttagaaagacatcaacggacccacaccggggaaaagccatataaatgccccgagtgcggcaaatcattcagccaaagtagcaacttagtaagacaccagcgcacccataccggggagaaaccatacaaatgccccgagtgtggaaagtcatttagtgatccaggcgcattagtaagacatcagcggacacataccggggaaaagccctacaagtgtcctgagtgcggaaagtctttctccactagcggttcattagtaagacaccagaggacacacaccggtggcggcagcggcggcagcgaattcgggcgcgccgacgcgctggacgatttcgatctcgacatgctgggttctgatgccctcgatgactttgacctggatatgttgggaagcgacgcattggatgactttgatctggacatgctcggctccgatgctctggacgatttcgatctcgatatgttaattaacggatccgagcagaaactcatctctgaagaagatctggaacaaaagttgatttcagaagaagatctggaacagaagctcatctctgaggaagatctgtaagcggccgcactcgagcaccaccaccaccaccaccaccactaattgattaatacctaggctgctaaacaaagcccgaaaggaagctgagttggctgctgccaccgctgagcaataactagcataaccccttggggcctctaaacgggtcttgaggggttttttgctgaaaggaggaactatatccggat

SEQ ID NO: 298 - DNA, 5800 bp, Artificial Sequence
  synthetic construct
tggcgaatgggacgcgccctgtagcggcgcattaagcgcggcgggtgtggtggttacgcgcagcgtgaccgctacacttgccagcgccctagcgcccgctcctttcgctttcttcccttcctttctcgccacgttcgccggctttccccgtcaagctctaaatcgggggctccctttagggttccgatttagtgctttacggcacctcgaccccaaaaaacttgattagggtgatggttcacgtagtgggccatcgccctgatagacggtttttcgccctttgacgttggagtccacgttctttaatagtggactcttgttccaaactggaacaacactcaaccctatctcggtctattcttttgatttataagggattttgccgatttcggcctattggttaaaaaatgagctgatttaacaaaaatttaacgcgaattttaacaaaatattaacgtttacaatttcaggtggcacttttcggggaaatgtgcgcggaacccctatttgtttatttttctaaatacattcaaatatgtatccgctcatgaattaattcttagaaaaactcatcgagcatcaaatgaaactgcaatttattcatatcaggattatcaataccatatttttgaaaaagccgtttctgtaatgaaggagaaaactcaccgaggcagttccataggatggcaagatcctggtatcggtctgcgattccgactcgtccaacatcaatacaacctattaatttcccctcgtcaaaaataaggttatcaagtgagaaatcaccatgagtgacgactgaatccggtgagaatggcaaaagtttatgcatttctttccagacttgttcaacaggccagccattacgctcgtcatcaaaatcactcgcatcaaccaaaccgttattcattcgtgattgcgcctgagcgagacgaaatacgcgatcgctgttaaaaggacaattacaaacaggaatcgaatgcaaccggcgcaggaacactgccagcgcatcaacaatattttcacctgaatcaggatattcttctaatacctggaatgctgttttcccggggatcgcagtggtgagtaaccatgcatcatcaggagtacggataaaatgcttgatggtcggaagaggcataaattccgtcagccagtttagtctgaccatctcatctgtaacatcattggcaacgctacctttgccatgtttcagaaacaactctggcgcatcgggcttcccatacaatcgatagattgtcgcacctgattgcccgacattatcgcgagcccatttatacccatataaatcagcatccatgttggaatttaatcgcggcctagagcaagacgtttcccgttgaatatggctcataacaccccttgtattactgtttatgtaagcagacagttttattgttcatgaccaaaatcccttaacgtgagttttcgttccactgagcgtcagaccccgtagaaaagatcaaaggatcttcttgagatcctttttttctgcgcgtaatctgctgcttgcaaacaaaaaaaccaccgctaccagcggtggtttgtttgccggatcaagagctaccaactctttttccgaaggtaactggcttcagcagagcgcagataccaaatactgtccttctagtgtagccgtagttaggccaccacttcaagaactctgtagcaccgcctacatacctcgctctgctaatcctgttaccagtggctgctgccagtggcgataagtcgtgtcttaccgggttggactcaagacgatagttaccggataaggcgcagcggtcgggctgaacggggggttcgtgcacacagcccagcttggagcgaacgacctacaccgaactgagatacctacagcgtgagctatgagaaagcgccacgcttcccgaagggagaaaggcggacaggtatccggtaagcggcagggtcggaacaggagagcgcacgagggagcttccagggggaaacgcctggtatctttatagtcctgtcgggtttcgccacctctgacttgagcgtcgatttttgtgatgctcgtcaggggggcggagcctatggaaaaacgccagcaacgcggcctttttacggttcctggccttttgctggccttttgctcacatgttctttcctgcgttatcccctgattctgtggataaccgtattaccgcctttgagtgagctgataccgctcgccgcagccgaacgaccgagcgcagcgagtcagtgagcgaggaagcggaagagcgcctgatgcggtattttctccttacgcatctgtgcggtatttcacaccgcatatatggtgcactctcagtacaatctgctctgatgccgcatagttaagccagtatacactccgctatcgctacgtgactgggtcatggctgcgccccgacacccgccaacacccgctgacgcgccctgacgggcttgtctgctcccggcatccgcttacagacaagctgtgaccgtctccgggagctgcatgtgtcagaggttttcaccgtcatcaccgaaacgcgcgaggcagctgcggtaaagctcatcagcgtggtcgtgaagcgattcacagatgtctgcctgttcatccgcgtccagctcgttgagtttctccagaagcgttaatgtctggcttctgataaagcgggccatgttaagggcggttttttcctgtttggtcactgatgcctccgtgtaagggggatttctgttcatgggggtaatgataccgatgaaacgagagaggatgctcacgatacgggttactgatgatgaacatgcccggttactggaacgttgtgagggtaaacaactggcggtatggatgcggcgggaccagagaaaaatcactcagggtcaatgccagcgcttcgttaatacagatgtaggtgttccacagggtagccagcagcatcctgcgatgcagatccggaacataatggtgcagggcgctgacttccgcgtttccagactttacgaaacacggaaaccgaagaccattcatgttgttgctcaggtcgcagacgttttgcagcagcagtcgcttcacgttcgctcgcgtatcggtgattcattctgctaaccagtaaggcaaccccgccagcctagccgggtcctcaacgacaggagcacgatcatgctagtcatgccccgcgcccaccggaaggagctgactgggttgaaggctctcaagggcatcggtcgagatcccggtgcctaatgagtgagctaacttacattaattgcgttgcgctcactgcccgctttccagtcgggaaacctgtcgtgccagctgcattaatgaatcggccaacgcgcggggagaggcggtttgcgtattgggcgccagggtggtttttcttttcaccagtgagacgggcaacagctgattgcccttcaccgcctggccctgagagagttgcagcaagcggtccacgctggtttgccccagcaggcgaaaatcctgtttgatggtggttaacggcgggatataacatgagctgtcttcggtatcgtcgtatcccactaccgagatgtccgcaccaacgcgcagcccggactcggtaatggcgcgcattgcgcccagcgccatctgatcgttggcaaccagcatcgcagtgggaacgatgccctcattcagcatttgcatggtttgttgaaaaccggacatggcactccagtcgccttcccgttccgctatcggctgaatttgattgcgagtgagatatttatgccagccagccagacgcagacgcgccgagacagaacttaatgggcccgctaacagcgcgatttgctggtgacccaatgcgaccagatgctccacgcccagtcgcgtaccgtcttcatgggagaaaataatactgttgatgggtgtctggtcagagacatcaagaaataacgccggaacattagtgcaggcagcttccacagcaatggcatcctggtcatccagcggatagttaatgatcagcccactgacgcgttgcgcgagaagattgtgcaccgccgctttacaggcttcgacgccgcttcgttctaccatcgacaccaccacgctggcacccagttgatcggcgcgagatttaatcgccgcgacaatttgcgacggcgcgtgcagggccagactggaggtggcaacgccaatcagcaacgactgtttgcccgccagttgttgtgccacgcggttgggaatgtaattcagctccgccatcgccgcttccactttttcccgcgttttcgcagaaacgtggctggcctggttcaccacgcgggaaacggtctgataagagacaccggcatactctgcgacatcgtataacgttactggtttcacattcaccaccctgaattgactctcttccgggcgctatcatgccataccgcgaaaggttttgcgccattcgatggtgtccgggatctcgacgctctcccttatgcgactcctgcattaggaagcagcccagtagtaggttgaggccgttgagcaccgccgccgcaaggaatggtgcatgcaaggagatggcgcccaacagtcccccggccacggggcctgccaccatacccacgccgaaacaagcgctcatgagcccgaagtggcgagcccgatcttccccatcggtgatgtcggcgatataggcgccagcaaccgcacctgtggcgccggtgatgccggccacgatgcgtccggcgtagaggatcgagatcgatctcgatcccgcgaaattaatacgactcactataggggaattgtgagcggataacaattcccctctagaaataattttgtttaactttaagaaggagatatacatatgcaccaccaccaccaccacggctatggccgcaaaaaacgccgccagcgccgccgcggctatccgtatgatgtgccggattatgccccatgccagccgatgaaacgtctgaccctgggcaacgatatcatggcggcggcggttcggatgaacatccagatgctgctggaggcggccgactatctggagcggcgggagagagaagctgaacatggttatgcctccatgttaccatacccgaaaaagaaacgtaaagtggggctcgagcccggggagaagccatataaatgtcccgagtgtggcaagtccttttctagatcagataatttagtaagacatcagagaacgcacaccggggagaagccgtacaagtgccctgaatgtggtaagtcattttcgagaagtgatgaattagtaagacaccagcggactcataccggggaaaagccctacaagtgcccggaatgcggcaagtcttttagcaccagcggacatttagtaagacaccagagaacccacaccggggagaagccttataagtgccctgagtgtggcaaaagcttcagcgatcctggaaatttagtaagacaccaacgcacccacaccggggaaaaaccttacaagtgccctgagtgcggcaagagcttctctcaatcaagttcattagtaagacaccagaggactcataccggggagaaaccatacaagtgtccagagtgcgggaaaagctttagtacaagcggtgagttagtaagacaccaacgaacacactaagcggccgcactcgagcaccaccaccaccaccaccaccactaattgattaatacctaggctgctaaacaaagcccgaaaggaagctgagttggctgctgccaccgctgagcaataactagcataaccccttggggcctctaaacgggtcttgaggggttttttgctgaaaggaggaactatatccggat

SEQ ID NO: 299 - DNA, 5860 bp, Artificial Sequence
  synthetic construct
tggcgaatgggacgcgccctgtagcggcgcattaagcgcggcgggtgtggtggttacgcgcagcgtgaccgctacacttgccagcgccctagcgcccgctcctttcgctttcttcccttcctttctcgccacgttcgccggctttccccgtcaagctctaaatcgggggctccctttagggttccgatttagtgctttacggcacctcgaccccaaaaaacttgattagggtgatggttcacgtagtgggccatcgccctgatagacggtttttcgccctttgacgttggagtccacgttctttaatagtggactcttgttccaaactggaacaacactcaaccctatctcggtctattcttttgatttataagggattttgccgatttcggcctattggttaaaaaatgagctgatttaacaaaaatttaacgcgaattttaacaaaatattaacgtttacaatttcaggtggcacttttcggggaaatgtgcgcggaacccctatttgtttatttttctaaatacattcaaatatgtatccgctcatgaattaattcttagaaaaactcatcgagcatcaaatgaaactgcaatttattcatatcaggattatcaataccatatttttgaaaaagccgtttctgtaatgaaggagaaaactcaccgaggcagttccataggatggcaagatcctggtatcggtctgcgattccgactcgtccaacatcaatacaacctattaatttcccctcgtcaaaaataaggttatcaagtgagaaatcaccatgagtgacgactgaatccggtgagaatggcaaaagtttatgcatttctttccagacttgttcaacaggccagccattacgctcgtcatcaaaatcactcgcatcaaccaaaccgttattcattcgtgattgcgcctgagcgagacgaaatacgcgatcgctgttaaaaggacaattacaaacaggaatcgaatgcaaccggcgcaggaacactgccagcgcatcaacaatattttcacctgaatcaggatattcttctaatacctggaatgctgttttcccggggatcgcagtggtgagtaaccatgcatcatcaggagtacggataaaatgcttgatggtcggaagaggcataaattccgtcagccagtttagtctgaccatctcatctgtaacatcattggcaacgctacctttgccatgtttcagaaacaactctggcgcatcgggcttcccatacaatcgatagattgtcgcacctgattgcccgacattatcgcgagcccatttatacccatataaatcagcatccatgttggaatttaatcgcggcctagagcaagacgtttcccgttgaatatggctcataacaccccttgtattactgtttatgtaagcagacagttttattgttcatgaccaaaatcccttaacgtgagttttcgttccactgagcgtcagaccccgtagaaaagatcaaaggatcttcttgagatcctttttttctgcgcgtaatctgctgcttgcaaacaaaaaaaccaccgctaccagcggtggtttgtttgccggatcaagagctaccaactctttttccgaaggtaactggcttcagcagagcgcagataccaaatactgtccttctagtgtagccgtagttaggccaccacttcaagaactctgtagcaccgcctacatacctcgctctgctaatcctgttaccagtggctgctgccagtggcgataagtcgtgtcttaccgggttggactcaagacgatagttaccggataaggcgcagcggtcgggctgaacggggggttcgtgcacacagcccagcttggagcgaacgacctacaccgaactgagatacctacagcgtgagctatgagaaagcgccacgcttcccgaagggagaaaggcggacaggtatccggtaagcggcagggtcggaacaggagagcgcacgagggagcttccagggggaaacgcctggtatctttatagtcctgtcgggtttcgccacctctgacttgagcgtcgatttttgtgatgctcgtcaggggggcggagcctatggaaaaacgccagcaacgcggcctttttacggttcctggccttttgctggccttttgctcacatgttctttcctgcgttatcccctgattctgtggataaccgtattaccgcctttgagtgagctgataccgctcgccgcagccgaacgaccgagcgcagcgagtcagtgagcgaggaagcggaagagcgcctgatgcggtattttctccttacgcatctgtgcggtatttcacaccgcatatatggtgcactctcagtacaatctgctctgatgccgcatagttaagccagtatacactccgctatcgctacgtgactgggtcatggctgcgccccgacacccgccaacacccgctgacgcgccctgacgggcttgtctgctcccggcatccgcttacagacaagctgtgaccgtctccgggagctgcatgtgtcagaggttttcaccgtcatcaccgaaacgcgcgaggcagctgcggtaaagctcatcagcgtggtcgtgaagcgattcacagatgtctgcctgttcatccgcgtccagctcgttgagtttctccagaagcgttaatgtctggcttctgataaagcgggccatgttaagggcggttttttcctgtttggtcactgatgcctccgtgtaagggggatttctgttcatgggggtaatgataccgatgaaacgagagaggatgctcacgatacgggttactgatgatgaacatgcccggttactggaacgttgtgagggtaaacaactggcggtatggatgcggcgggaccagagaaaaatcactcagggtcaatgccagcgcttcgttaatacagatgtaggtgttccacagggtagccagcagcatcctgcgatgcagatccggaacataatggtgcagggcgctgacttccgcgtttccagactttacgaaacacggaaaccgaagaccattcatgttgttgctcaggtcgcagacgttttgcagcagcagtcgcttcacgttcgctcgcgtatcggtgattcattctgctaaccagtaaggcaaccccgccagcctagccgggtcctcaacgacaggagcacgatcatgctagtcatgccccgcgcccaccggaaggagctgactgggttgaaggctctcaagggcatcggtcgagatcccggtgcctaatgagtgagctaacttacattaattgcgttgcgctcactgcccgctttccagtcgggaaacctgtcgtgccagctgcattaatgaatcggccaacgcgcggggagaggcggtttgcgtattgggcgccagggtggtttttcttttcaccagtgagacgggcaacagctgattgcccttcaccgcctggccctgagagagttgcagcaagcggtccacgctggtttgccccagcaggcgaaaatcctgtttgatggtggttaacggcgggatataacatgagctgtcttcggtatcgtcgtatcccactaccgagatgtccgcaccaacgcgcagcccggactcggtaatggcgcgcattgcgcccagcgccatctgatcgttggcaaccagcatcgcagtgggaacgatgccctcattcagcatttgcatggtttgttgaaaaccggacatggcactccagtcgccttcccgttccgctatcggctgaatttgattgcgagtgagatatttatgccagccagccagacgcagacgcgccgagacagaacttaatgggcccgctaacagcgcgatttgctggtgacccaatgcgaccagatgctccacgcccagtcgcgtaccgtcttcatgggagaaaataatactgttgatgggtgtctggtcagagacatcaagaaataacgccggaacattagtgcaggcagcttccacagcaatggcatcctggtcatccagcggatagttaatgatcagcccactgacgcgttgcgcgagaagattgtgcaccgccgctttacaggcttcgacgccgcttcgttctaccatcgacaccaccacgctggcacccagttgatcggcgcgagatttaatcgccgcgacaatttgcgacggcgcgtgcagggccagactggaggtggcaacgccaatcagcaacgactgtttgcccgccagttgttgtgccacgcggttgggaatgtaattcagctccgccatcgccgcttccactttttcccgcgttttcgcagaaacgtggctggcctggttcaccacgcgggaaacggtctgataagagacaccggcatactctgcgacatcgtataacgttactggtttcacattcaccaccctgaattgactctcttccgggcgctatcatgccataccgcgaaaggttttgcgccattcgatggtgtccgggatctcgacgctctcccttatgcgactcctgcattaggaagcagcccagtagtaggttgaggccgttgagcaccgccgccgcaaggaatggtgcatgcaaggagatggcgcccaacagtcccccggccacggggcctgccaccatacccacgccgaaacaagcgctcatgagcccgaagtggcgagcccgatcttccccatcggtgatgtcggcgatataggcgccagcaaccgcacctgtggcgccggtgatgccggccacgatgcgtccggcgtagaggatcgagatcgatctcgatcccgcgaaattaatacgactcactataggggaattgtgagcggataacaattcccctctagaaataattttgtttaactttaagaaggagatatacatatgcaccaccaccaccaccacggctatggccgcaaaaaacgccgccagcgccgccgccagccgatgaaacgtctgaccctgggcaacgatatcatggcggcggcggttcggatgaacatccagatgctgctggaggcggccgactatctggagcggcgggagagagaagctgaacatggttatgcctccatgttaccatacccgaaaaagaaacgtaaagtggggctcgagcccggggagaagccatataaatgtcccgagtgtggcaagtccttttctagatcagataatttagtaagacatcagagaacgcacaccggggagaagccgtacaagtgccctgaatgtggtaagtcattttcgagaagtgatgaattagtaagacaccagcggactcataccggggaaaagccctacaagtgcccggaatgcggcaagtcttttagcaccagcggacatttagtaagacaccagagaacccacaccggggagaagccttataagtgccctgagtgtggcaaaagcttcagcgatcctggaaatttagtaagacaccaacgcacccacaccggggaaaaaccttacaagtgccctgagtgcggcaagagcttctctcaatcaagttcattagtaagacaccagaggactcataccggggagaaaccatacaagtgtccagagtgcgggaaaagctttagtacaagcggtgagttagtaagacaccaacgaacacacaccggtgagcagaaactcatctctgaagaagatctggaacaaaagttgatttcagaagaagatctggaacagaagctcatctctgaggaagatctgtaagcggccgcactcgagcaccaccaccaccaccaccaccactaattgattaatacctaggctgctaaacaaagcccgaaaggaagctgagttggctgctgccaccgctgagcaataactagcataaccccttggggcctctaaacgggtcttgaggggttttttgctgaaaggaggaactatatccggat

SEQ ID NO: 300 - DNA, 5878 bp, Artificial Sequence
  synthetic construct
tggcgaatgggacgcgccctgtagcggcgcattaagcgcggcgggtgtggtggttacgcgcagcgtgaccgctacacttgccagcgccctagcgcccgctcctttcgctttcttcccttcctttctcgccacgttcgccggctttccccgtcaagctctaaatcgggggctccctttagggttccgatttagtgctttacggcacctcgaccccaaaaaacttgattagggtgatggttcacgtagtgggccatcgccctgatagacggtttttcgccctttgacgttggagtccacgttctttaatagtggactcttgttccaaactggaacaacactcaaccctatctcggtctattcttttgatttataagggattttgccgatttcggcctattggttaaaaaatgagctgatttaacaaaaatttaacgcgaattttaacaaaatattaacgtttacaatttcaggtggcacttttcggggaaatgtgcgcggaacccctatttgtttatttttctaaatacattcaaatatgtatccgctcatgaattaattcttagaaaaactcatcgagcatcaaatgaaactgcaatttattcatatcaggattatcaataccatatttttgaaaaagccgtttctgtaatgaaggagaaaactcaccgaggcagttccataggatggcaagatcctggtatcggtctgcgattccgactcgtccaacatcaatacaacctattaatttcccctcgtcaaaaataaggttatcaagtgagaaatcaccatgagtgacgactgaatccggtgagaatggcaaaagtttatgcatttctttccagacttgttcaacaggccagccattacgctcgtcatcaaaatcactcgcatcaaccaaaccgttattcattcgtgattgcgcctgagcgagacgaaatacgcgatcgctgttaaaaggacaattacaaacaggaatcgaatgcaaccggcgcaggaacactgccagcgcatcaacaatattttcacctgaatcaggatattcttctaatacctggaatgctgttttcccggggatcgcagtggtgagtaaccatgcatcatcaggagtacggataaaatgcttgatggtcggaagaggcataaattccgtcagccagtttagtctgaccatctcatctgtaacatcattggcaacgctacctttgccatgtttcagaaacaactctggcgcatcgggcttcccatacaatcgatagattgtcgcacctgattgcccgacattatcgcgagcccatttatacccatataaatcagcatccatgttggaatttaatcgcggcctagagcaagacgtttcccgttgaatatggctcataacaccccttgtattactgtttatgtaagcagacagttttattgttcatgaccaaaatcccttaacgtgagttttcgttccactgagcgtcagaccccgtagaaaagatcaaaggatcttcttgagatcctttttttctgcgcgtaatctgctgcttgcaaacaaaaaaaccaccgctaccagcggtggtttgtttgccggatcaagagctaccaactctttttccgaaggtaactggcttcagcagagcgcagataccaaatactgtccttctagtgtagccgtagttaggccaccacttcaagaactctgtagcaccgcctacatacctcgctctgctaatcctgttaccagtggctgctgccagtggcgataagtcgtgtcttaccgggttggactcaagacgatagttaccggataaggcgcagcggtcgggctgaacggggggttcgtgcacacagcccagcttggagcgaacgacctacaccgaactgagatacctacagcgtgagctatgagaaagcgccacgcttcccgaagggagaaaggcggacaggtatccggtaagcggcagggtcggaacaggagagcgcacgagggagcttccagggggaaacgcctggtatctttatagtcctgtcgggtttcgccacctctgacttgagcgtcgatttttgtgatgctcgtcaggggggcggagcctatggaaaaacgccagcaacgcggcctttttacggttcctggccttttgctggccttttgctcacatgttctttcctgcgttatcccctgattctgtggataaccgtattaccgcctttgagtgagctgataccgctcgccgcagccgaacgaccgagcgcagcgagtcagtgagcgaggaagcggaagagcgcctgatgcggtattttctccttacgcatctgtgcggtatttcacaccgcatatatggtgcactctcagtacaatctgctctgatgccgcatagttaagccagtatacactccgctatcgctacgtgactgggtcatggctgcgccccgacacccgccaacacccgctgacgcgccctgacgggcttgtctgctcccggcatccgcttacagacaagctgtgaccgtctccgggagctgcatgtgtcagaggttttcaccgtcatcaccgaaacgcgcgaggcagctgcggtaaagctcatcagcgtggtcgtgaagcgattcacagatgtctgcctgttcatccgcgtccagctcgttgagtttctccagaagcgttaatgtctggcttctgataaagcgggccatgttaagggcggttttttcctgtttggtcactgatgcctccgtgtaagggggatttctgttcatgggggtaatgataccgatgaaacgagagaggatgctcacgatacgggttactgatgatgaacatgcccggttactggaacgttgtgagggtaaacaactggcggtatggatgcggcgggaccagagaaaaatcactcagggtcaatgccagcgcttcgttaatacagatgtaggtgttccacagggtagccagcagcatcctgcgatgcagatccggaacataatggtgcagggcgctgacttccgcgtttccagactttacgaaacacggaaaccgaagaccattcatgttgttgctcaggtcgcagacgttttgcagcagcagtcgcttcacgttcgctcgcgtatcggtgattcattctgctaaccagtaaggcaaccccgccagcctagccgggtcctcaacgacaggagcacgatcatgctagtcatgccccgcgcccaccggaaggagctgactgggttgaaggctctcaagggcatcggtcgagatcccggtgcctaatgagtgagctaacttacattaattgcgttgcgctcactgcccgctttccagtcgggaaacctgtcgtgccagctgcattaatgaatcggccaacgcgcggggagaggcggtttgcgtattgggcgccagggtggtttttcttttcaccagtgagacgggcaacagctgattgcccttcaccgcctggccctgagagagttgcagcaagcggtccacgctggtttgccccagcaggcgaaaatcctgtttgatggtggttaacggcgggatataacatgagctgtcttcggtatcgtcgtatcccactaccgagatgtccgcaccaacgcgcagcccggactcggtaatggcgcgcattgcgcccagcgccatctgatcgttggcaaccagcatcgcagtgggaacgatgccctcattcagcatttgcatggtttgttgaaaaccggacatggcactccagtcgccttcccgttccgctatcggctgaatttgattgcgagtgagatatttatgccagccagccagacgcagacgcgccgagacagaacttaatgggcccgctaacagcgcgatttgctggtgacccaatgcgaccagatgctccacgcccagtcgcgtaccgtcttcatgggagaaaataatactgttgatgggtgtctggtcagagacatcaagaaataacgccggaacattagtgcaggcagcttccacagcaatggcatcctggtcatccagcggatagttaatgatcagcccactgacgcgttgcgcgagaagattgtgcaccgccgctttacaggcttcgacgccgcttcgttctaccatcgacaccaccacgctggcacccagttgatcggcgcgagatttaatcgccgcgacaatttgcgacggcgcgtgcagggccagactggaggtggcaacgccaatcagcaacgactgtttgcccgccagttgttgtgccacgcggttgggaatgtaattcagctccgccatcgccgcttccactttttcccgcgttttcgcagaaacgtggctggcctggttcaccacgcgggaaacggtctgataagagacaccggcatactctgcgacatcgtataacgttactggtttcacattcaccaccctgaattgactctcttccgggcgctatcatgccataccgcgaaaggttttgcgccattcgatggtgtccgggatctcgacgctctcccttatgcgactcctgcattaggaagcagcccagtagtaggttgaggccgttgagcaccgccgccgcaaggaatggtgcatgcaaggagatggcgcccaacagtcccccggccacggggcctgccaccatacccacgccgaaacaagcgctcatgagcccgaagtggcgagcccgatcttccccatcggtgatgtcggcgatataggcgccagcaaccgcacctgtggcgccggtgatgccggccacgatgcgtccggcgtagaggatcgagatcgatctcgatcccgcgaaattaatacgactcactataggggaattgtgagcggataacaattcccctctagaaataattttgtttaactttaagaaggagatatacatatgcaccaccaccaccaccacggctatggccgcaaaaaacgccgccagcgccgccgcggcggttcgggcggtagccagccgatgaaacgtctgaccctgggcaacgatatcatggcggcggcggttcggatgaacatccagatgctgctggaggcggccgactatctggagcggcgggagagagaagctgaacatggttatgcctccatgttaccatacccgaaaaagaaacgtaaagtggggctcgagcccggggagaagccatataaatgtcccgagtgtggcaagtccttttctagatcagataatttagtaagacatcagagaacgcacaccggggagaagccgtacaagtgccctgaatgtggtaagtcattttcgagaagtgatgaattagtaagacaccagcggactcataccggggaaaagccctacaagtgcccggaatgcggcaagtcttttagcaccagcggacatttagtaagacaccagagaacccacaccggggagaagccttataagtgccctgagtgtggcaaaagcttcagcgatcctggaaatttagtaagacaccaacgcacccacaccggggaaaaaccttacaagtgccctgagtgcggcaagagcttctctcaatcaagttcattagtaagacaccagaggactcataccggggagaaaccatacaagtgtccagagtgcgggaaaagctttagtacaagcggtgagttagtaagacaccaacgaacacacaccggtgagcagaaactcatctctgaagaagatctggaacaaaagttgatttcagaagaagatctggaacagaagctcatctctgaggaagatctgtaagcggccgcactcgagcaccaccaccaccaccaccaccactaattgattaatacctaggctgctaaacaaagcccgaaaggaagctgagttggctgctgccaccgctgagcaataactagcataaccccttggggcctctaaacgggtcttgaggggttttttgctgaaaggaggaactatatccggat

SEQ ID NO: 301 - DNA, 5890 bp, Artificial Sequence
  synthetic construct
tggcgaatgggacgcgccctgtagcggcgcattaagcgcggcgggtgtggtggttacgcgcagcgtgaccgctacacttgccagcgccctagcgcccgctcctttcgctttcttcccttcctttctcgccacgttcgccggctttccccgtcaagctctaaatcgggggctccctttagggttccgatttagtgctttacggcacctcgaccccaaaaaacttgattagggtgatggttcacgtagtgggccatcgccctgatagacggtttttcgccctttgacgttggagtccacgttctttaatagtggactcttgttccaaactggaacaacactcaaccctatctcggtctattcttttgatttataagggattttgccgatttcggcctattggttaaaaaatgagctgatttaacaaaaatttaacgcgaattttaacaaaatattaacgtttacaatttcaggtggcacttttcggggaaatgtgcgcggaacccctatttgtttatttttctaaatacattcaaatatgtatccgctcatgaattaattcttagaaaaactcatcgagcatcaaatgaaactgcaatttattcatatcaggattatcaataccatatttttgaaaaagccgtttctgtaatgaaggagaaaactcaccgaggcagttccataggatggcaagatcctggtatcggtctgcgattccgactcgtccaacatcaatacaacctattaatttcccctcgtcaaaaataaggttatcaagtgagaaatcaccatgagtgacgactgaatccggtgagaatggcaaaagtttatgcatttctttccagacttgttcaacaggccagccattacgctcgtcatcaaaatcactcgcatcaaccaaaccgttattcattcgtgattgcgcctgagcgagacgaaatacgcgatcgctgttaaaaggacaattacaaacaggaatcgaatgcaaccggcgcaggaacactgccagcgcatcaacaatattttcacctgaatcaggatattcttctaatacctggaatgctgttttcccggggatcgcagtggtgagtaaccatgcatcatcaggagtacggataaaatgcttgatggtcggaagaggcataaattccgtcagccagtttagtctgaccatctcatctgtaacatcattggcaacgctacctttgccatgtttcagaaacaactctggcgcatcgggcttcccatacaatcgatagattgtcgcacctgattgcccgacattatcgcgagcccatttatacccatataaatcagcatccatgttggaatttaatcgcggcctagagcaagacgtttcccgttgaatatggctcataacaccccttgtattactgtttatgtaagcagacagttttattgttcatgaccaaaatcccttaacgtgagttttcgttccactgagcgtcagaccccgtagaaaagatcaaaggatcttcttgagatcctttttttctgcgcgtaatctgctgcttgcaaacaaaaaaaccaccgctaccagcggtggtttgtttgccggatcaagagctaccaactctttttccgaaggtaactggcttcagcagagcgcagataccaaatactgtccttctagtgtagccgtagttaggccaccacttcaagaactctgtagcaccgcctacatacctcgctctgctaatcctgttaccagtggctgctgccagtggcgataagtcgtgtcttaccgggttggactcaagacgatagttaccggataaggcgcagcggtcgggctgaacggggggttcgtgcacacagcccagcttggagcgaacgacctacaccgaactgagatacctacagcgtgagctatgagaaagcgccacgcttcccgaagggagaaaggcggacaggtatccggtaagcggcagggtcggaacaggagagcgcacgagggagcttccagggggaaacgcctggtatctttatagtcctgtcgggtttcgccacctctgacttgagcgtcgatttttgtgatgctcgtcaggggggcggagcctatggaaaaacgccagcaacgcggcctttttacggttcctggccttttgctggccttttgctcacatgttctttcctgcgttatcccctgattctgtggataaccgtattaccgcctttgagtgagctgataccgctcgccgcagccgaacgaccgagcgcagcgagtcagtgagcgaggaagcggaagagcgcctgatgcggtattttctccttacgcatctgtgcggtatttcacaccgcatatatggtgcactctcagtacaatctgctctgatgccgcatagttaagccagtatacactccgctatcgctacgtgactgggtcatggctgcgccccgacacccgccaacacccgctgacgcgccctgacgggcttgtctgctcccggcatccgcttacagacaagctgtgaccgtctccgggagctgcatgtgtcagaggttttcaccgtcatcaccgaaacgcgcgaggcagctgcggtaaagctcatcagcgtggtcgtgaagcgattcacagatgtctgcctgttcatccgcgtccagctcgttgagtttctccagaagcgttaatgtctggcttctgataaagcgggccatgttaagggcggttttttcctgtttggtcactgatgcctccgtgtaagggggatttctgttcatgggggtaatgataccgatgaaacgagagaggatgctcacgatacgggttactgatgatgaacatgcccggttactggaacgttgtgagggtaaacaactggcggtatggatgcggcgggaccagagaaaaatcactcagggtcaatgccagcgcttcgttaatacagatgtaggtgttccacagggtagccagcagcatcctgcgatgcagatccggaacataatggtgcagggcgctgacttccgcgtttccagactttacgaaacacggaaaccgaagaccattcatgttgttgctcaggtcgcagacgttttgcagcagcagtcgcttcacgttcgctcgcgtatcggtgattcattctgctaaccagtaaggcaaccccgccagcctagccgggtcctcaacgacaggagcacgatcatgctagtcatgccccgcgcccaccggaaggagctgactgggttgaaggctctcaagggcatcggtcgagatcccggtgcctaatgagtgagctaacttacattaattgcgttgcgctcactgcccgctttccagtcgggaaacctgtcgtgccagctgcattaatgaatcggccaacgcgcggggagaggcggtttgcgtattgggcgccagggtggtttttcttttcaccagtgagacgggcaacagctgattgcccttcaccgcctggccctgagagagttgcagcaagcggtccacgctggtttgccccagcaggcgaaaatcctgtttgatggtggttaacggcgggatataacatgagctgtcttcggtatcgtcgtatcccactaccgagatgtccgcaccaacgcgcagcccggactcggtaatggcgcgcattgcgcccagcgccatctgatcgttggcaaccagcatcgcagtgggaacgatgccctcattcagcatttgcatggtttgttgaaaaccggacatggcactccagtcgccttcccgttccgctatcggctgaatttgattgcgagtgagatatttatgccagccagccagacgcagacgcgccgagacagaacttaatgggcccgctaacagcgcgatttgctggtgacccaatgcgaccagatgctccacgcccagtcgcgtaccgtcttcatgggagaaaataatactgttgatgggtgtctggtcagagacatcaagaaataacgccggaacattagtgcaggcagcttccacagcaatggcatcctggtcatccagcggatagttaatgatcagcccactgacgcgttgcgcgagaagattgtgcaccgccgctttacaggcttcgacgccgcttcgttctaccatcgacaccaccacgctggcacccagttgatcggcgcgagatttaatcgccgcgacaatttgcgacggcgcgtgcagggccagactggaggtggcaacgccaatcagcaacgactgtttgcccgccagttgttgtgccacgcggttgggaatgtaattcagctccgccatcgccgcttccactttttcccgcgttttcgcagaaacgtggctggcctggttcaccacgcgggaaacggtctgataagagacaccggcatactctgcgacatcgtataacgttactggtttcacattcaccaccctgaattgactctcttccgggcgctatcatgccataccgcgaaaggttttgcgccattcgatggtgtccgggatctcgacgctctcccttatgcgactcctgcattaggaagcagcccagtagtaggttgaggccgttgagcaccgccgccgcaaggaatggtgcatgcaaggagatggcgcccaacagtcccccggccacggggcctgccaccatacccacgccgaaacaagcgctcatgagcccgaagtggcgagcccgatcttccccatcggtgatgtcggcgatataggcgccagcaaccgcacctgtggcgccggtgatgccggccacgatgcgtccggcgtagaggatcgagatcgatctcgatcccgcgaaattaatacgactcactataggggaattgtgagcggataacaattcccctctagaaataattttgtttaactttaagaaggagatatacatatgcaccaccaccaccaccacggctatggccgcaaaaaacgccgccagcgccgccgcggctatccgtatgatgtgccggattatgccccatgccagccgatgaaacgtctgaccctgggcaacatggcggcggcggttcggatgaacatccagatgctgctggaggcggccgactatctggagcggcgggagagagaagctgaacatggttatgcctccatgttaccatacccgaaaaagaaacgtaaagtggggctcgagcccggggagaagccatataaatgtcccgagtgtggcaagtccttttctagatcagataatttagtaagacatcagagaacgcacaccggggagaagccgtacaagtgccctgaatgtggtaagtcattttcgagaagtgatgaattagtaagacaccagcggactcataccggggaaaagccctacaagtgcccggaatgcggcaagtcttttagcaccagcggacatttagtaagacaccagagaacccacaccggggagaagccttataagtgccctgagtgtggcaaaagcttcagcgatcctggaaatttagtaagacaccaacgcacccacaccggggaaaaaccttacaagtgccctgagtgcggcaagagcttctctcaatcaagttcattagtaagacaccagaggactcataccggggagaaaccatacaagtgtccagagtgcgggaaaagctttagtacaagcggtgagttagtaagacaccaacgaacacacaccggtgagcagaaactcatctctgaagaagatctggaacaaaagttgatttcagaagaagatctggaacagaagctcatctctgaggaagatctgtaagcggccgcactcgagcaccaccaccaccaccaccaccactaattgattaatacctaggctgctaaacaaagcccgaaaggaagctgagttggctgctgccaccgctgagcaataactagcataaccccttggggcctctaaacgggtcttgaggggttttttgctgaaaggaggaactatatccggat

SEQ ID NO: 302 - DNA, 5896 bp, Artificial Sequence
  synthetic construct
tggcgaatgggacgcgccctgtagcggcgcattaagcgcggcgggtgtggtggttacgcgcagcgtgaccgctacacttgccagcgccctagcgcccgctcctttcgctttcttcccttcctttctcgccacgttcgccggctttccccgtcaagctctaaatcgggggctccctttagggttccgatttagtgctttacggcacctcgaccccaaaaaacttgattagggtgatggttcacgtagtgggccatcgccctgatagacggtttttcgccctttgacgttggagtccacgttctttaatagtggactcttgttccaaactggaacaacactcaaccctatctcggtctattcttttgatttataagggattttgccgatttcggcctattggttaaaaaatgagctgatttaacaaaaatttaacgcgaattttaacaaaatattaacgtttacaatttcaggtggcacttttcggggaaatgtgcgcggaacccctatttgtttatttttctaaatacattcaaatatgtatccgctcatgaattaattcttagaaaaactcatcgagcatcaaatgaaactgcaatttattcatatcaggattatcaataccatatttttgaaaaagccgtttctgtaatgaaggagaaaactcaccgaggcagttccataggatggcaagatcctggtatcggtctgcgattccgactcgtccaacatcaatacaacctattaatttcccctcgtcaaaaataaggttatcaagtgagaaatcaccatgagtgacgactgaatccggtgagaatggcaaaagtttatgcatttctttccagacttgttcaacaggccagccattacgctcgtcatcaaaatcactcgcatcaaccaaaccgttattcattcgtgattgcgcctgagcgagacgaaatacgcgatcgctgttaaaaggacaattacaaacaggaatcgaatgcaaccggcgcaggaacactgccagcgcatcaacaatattttcacctgaatcaggatattcttctaatacctggaatgctgttttcccggggatcgcagtggtgagtaaccatgcatcatcaggagtacggataaaatgcttgatggtcggaagaggcataaattccgtcagccagtttagtctgaccatctcatctgtaacatcattggcaacgctacctttgccatgtttcagaaacaactctggcgcatcgggcttcccatacaatcgatagattgtcgcacctgattgcccgacattatcgcgagcccatttatacccatataaatcagcatccatgttggaatttaatcgcggcctagagcaagacgtttcccgttgaatatggctcataacaccccttgtattactgtttatgtaagcagacagttttattgttcatgaccaaaatcccttaacgtgagttttcgttccactgagcgtcagaccccgtagaaaagatcaaaggatcttcttgagatcctttttttctgcgcgtaatctgctgcttgcaaacaaaaaaaccaccgctaccagcggtggtttgtttgccggatcaagagctaccaactctttttccgaaggtaactggcttcagcagagcgcagataccaaatactgtccttctagtgtagccgtagttaggccaccacttcaagaactctgtagcaccgcctacatacctcgctctgctaatcctgttaccagtggctgctgccagtggcgataagtcgtgtcttaccgggttggactcaagacgatagttaccggataaggcgcagcggtcgggctgaacggggggttcgtgcacacagcccagcttggagcgaacgacctacaccgaactgagatacctacagcgtgagctatgagaaagcgccacgcttcccgaagggagaaaggcggacaggtatccggtaagcggcagggtcggaacaggagagcgcacgagggagcttccagggggaaacgcctggtatctttatagtcctgtcgggtttcgccacctctgacttgagcgtcgatttttgtgatgctcgtcaggggggcggagcctatggaaaaacgccagcaacgcggcctttttacggttcctggccttttgctggccttttgctcacatgttctttcctgcgttatcccctgattctgtggataaccgtattaccgcctttgagtgagctgataccgctcgccgcagccgaacgaccgagcgcagcgagtcagtgagcgaggaagcggaagagcgcctgatgcggtattttctccttacgcatctgtgcggtatttcacaccgcatatatggtgcactctcagtacaatctgctctgatgccgcatagttaagccagtatacactccgctatcgctacgtgactgggtcatggctgcgccccgacacccgccaacacccgctgacgcgccctgacgggcttgtctgctcccggcatccgcttacagacaagctgtgaccgtctccgggagctgcatgtgtcagaggttttcaccgtcatcaccgaaacgcgcgaggcagctgcggtaaagctcatcagcgtggtcgtgaagcgattcacagatgtctgcctgttcatccgcgtccagctcgttgagtttctccagaagcgttaatgtctggcttctgataaagcgggccatgttaagggcggttttttcctgtttggtcactgatgcctccgtgtaagggggatttctgttcatgggggtaatgataccgatgaaacgagagaggatgctcacgatacgggttactgatgatgaacatgcccggttactggaacgttgtgagggtaaacaactggcggtatggatgcggcgggaccagagaaaaatcactcagggtcaatgccagcgcttcgttaatacagatgtaggtgttccacagggtagccagcagcatcctgcgatgcagatccggaacataatggtgcagggcgctgacttccgcgtttccagactttacgaaacacggaaaccgaagaccattcatgttgttgctcaggtcgcagacgttttgcagcagcagtcgcttcacgttcgctcgcgtatcggtgattcattctgctaaccagtaaggcaaccccgccagcctagccgggtcctcaacgacaggagcacgatcatgctagtcatgccccgcgcccaccggaaggagctgactgggttgaaggctctcaagggcatcggtcgagatcccggtgcctaatgagtgagctaacttacattaattgcgttgcgctcactgcccgctttccagtcgggaaacctgtcgtgccagctgcattaatgaatcggccaacgcgcggggagaggcggtttgcgtattgggcgccagggtggtttttcttttcaccagtgagacgggcaacagctgattgcccttcaccgcctggccctgagagagttgcagcaagcggtccacgctggtttgccccagcaggcgaaaatcctgtttgatggtggttaacggcgggatataacatgagctgtcttcggtatcgtcgtatcccactaccgagatgtccgcaccaacgcgcagcccggactcggtaatggcgcgcattgcgcccagcgccatctgatcgttggcaaccagcatcgcagtgggaacgatgccctcattcagcatttgcatggtttgttgaaaaccggacatggcactccagtcgccttcccgttccgctatcggctgaatttgattgcgagtgagatatttatgccagccagccagacgcagacgcgccgagacagaacttaatgggcccgctaacagcgcgatttgctggtgacccaatgcgaccagatgctccacgcccagtcgcgtaccgtcttcatgggagaaaataatactgttgatgggtgtctggtcagagacatcaagaaataacgccggaacattagtgcaggcagcttccacagcaatggcatcctggtcatccagcggatagttaatgatcagcccactgacgcgttgcgcgagaagattgtgcaccgccgctttacaggcttcgacgccgcttcgttctaccatcgacaccaccacgctggcacccagttgatcggcgcgagatttaatcgccgcgacaatttgcgacggcgcgtgcagggccagactggaggtggcaacgccaatcagcaacgactgtttgcccgccagttgttgtgccacgcggttgggaatgtaattcagctccgccatcgccgcttccactttttcccgcgttttcgcagaaacgtggctggcctggttcaccacgcgggaaacggtctgataagagacaccggcatactctgcgacatcgtataacgttactggtttcacattcaccaccctgaattgactctcttccgggcgctatcatgccataccgcgaaaggttttgcgccattcgatggtgtccgggatctcgacgctctcccttatgcgactcctgcattaggaagcagcccagtagtaggttgaggccgttgagcaccgccgccgcaaggaatggtgcatgcaaggagatggcgcccaacagtcccccggccacggggcctgccaccatacccacgccgaaacaagcgctcatgagcccgaagtggcgagcccgatcttccccatcggtgatgtcggcgatataggcgccagcaaccgcacctgtggcgccggtgatgccggccacgatgcgtccggcgtagaggatcgagatcgatctcgatcccgcgaaattaatacgactcactataggggaattgtgagcggataacaattcccctctagaaataattttgtttaactttaagaaggagatatacatatgcaccaccaccaccaccacggctatggccgcaaaaaacgccgccagcgccgccgcggctatccgtatgatgtgccggattatgccccatgccagccgatgaaacgtctgaccctgggcaacgatatcatggcggcggcggttcggatgaacatccagatgctgctggaggcggccgactatctggagcggcgggagagagaagctgaacatggttatgcctccatgttaccatacccgaaaaagaaacgtaaagtggggctcgagcccggggaaaaaccctataaatgccccgagtgtggtaagtcattctctcaaagcggggatttaagaagacaccagagaacccacaccggggaaaagccatataaatgccccgagtgcggcaaatcattcagccaaagtagcaacttagtaagacaccagcgcacccataccggggagaagccatataaatgtcccgagtgtggcaagtccttttctagatcagataatttagtaagacatcagagaacgcacaccggggaaaagccctataagtgtcccgaatgcggcaagagttttagtactactggcgcactcacagaacaccagcgcactcacaccggggaaaagccttataagtgccccgaatgcggaaagagcttctcaaggaatgatgcacttaccgagcatcaaaggactcataccggggaaaaaccttataagtgtcccgagtgcggcaagagtttcagtcacaaaaacgcacttcagaatcatcagaggacacataccggtgagcagaaactcatctctgaagaagatctggaacaaaagttgatttcagaagaagatctggaacagaagctcatctctgaggaagatctgtaagcggccgcactcgagcaccaccaccaccaccaccaccactaattgattaatacctaggctgctaaacaaagcccgaaaggaagctgagttggctgctgccaccgctgagcaataactagcataaccccttggggcctctaaacgggtcttgaggggttttttgctgaaaggaggaactatatccggat

SEQ ID NO: 303 - DNA, 5896 bp, Artificial Sequence
  synthetic construct
tggcgaatgggacgcgccctgtagcggcgcattaagcgcggcgggtgtggtggttacgcgcagcgtgaccgctacacttgccagcgccctagcgcccgctcctttcgctttcttcccttcctttctcgccacgttcgccggctttccccgtcaagctctaaatcgggggctccctttagggttccgatttagtgctttacggcacctcgaccccaaaaaacttgattagggtgatggttcacgtagtgggccatcgccctgatagacggtttttcgccctttgacgttggagtccacgttctttaatagtggactcttgttccaaactggaacaacactcaaccctatctcggtctattcttttgatttataagggattttgccgatttcggcctattggttaaaaaatgagctgatttaacaaaaatttaacgcgaattttaacaaaatattaacgtttacaatttcaggtggcacttttcggggaaatgtgcgcggaacccctatttgtttatttttctaaatacattcaaatatgtatccgctcatgaattaattcttagaaaaactcatcgagcatcaaatgaaactgcaatttattcatatcaggattatcaataccatatttttgaaaaagccgtttctgtaatgaaggagaaaactcaccgaggcagttccataggatggcaagatcctggtatcggtctgcgattccgactcgtccaacatcaatacaacctattaatttcccctcgtcaaaaataaggttatcaagtgagaaatcaccatgagtgacgactgaatccggtgagaatggcaaaagtttatgcatttctttccagacttgttcaacaggccagccattacgctcgtcatcaaaatcactcgcatcaaccaaaccgttattcattcgtgattgcgcctgagcgagacgaaatacgcgatcgctgttaaaaggacaattacaaacaggaatcgaatgcaaccggcgcaggaacactgccagcgcatcaacaatattttcacctgaatcaggatattcttctaatacctggaatgctgttttcccggggatcgcagtggtgagtaaccatgcatcatcaggagtacggataaaatgcttgatggtcggaagaggcataaattccgtcagccagtttagtctgaccatctcatctgtaacatcattggcaacgctacctttgccatgtttcagaaacaactctggcgcatcgggcttcccatacaatcgatagattgtcgcacctgattgcccgacattatcgcgagcccatttatacccatataaatcagcatccatgttggaatttaatcgcggcctagagcaagacgtttcccgttgaatatggctcataacaccccttgtattactgtttatgtaagcagacagttttattgttcatgaccaaaatcccttaacgtgagttttcgttccactgagcgtcagaccccgtagaaaagatcaaaggatcttcttgagatcctttttttctgcgcgtaatctgctgcttgcaaacaaaaaaaccaccgctaccagcggtggtttgtttgccggatcaagagctaccaactctttttccgaaggtaactggcttcagcagagcgcagataccaaatactgtccttctagtgtagccgtagttaggccaccacttcaagaactctgtagcaccgcctacatacctcgctctgctaatcctgttaccagtggctgctgccagtggcgataagtcgtgtcttaccgggttggactcaagacgatagttaccggataaggcgcagcggtcgggctgaacggggggttcgtgcacacagcccagcttggagcgaacgacctacaccgaactgagatacctacagcgtgagctatgagaaagcgccacgcttcccgaagggagaaaggcggacaggtatccggtaagcggcagggtcggaacaggagagcgcacgagggagcttccagggggaaacgcctggtatctttatagtcctgtcgggtttcgccacctctgacttgagcgtcgatttttgtgatgctcgtcaggggggcggagcctatggaaaaacgccagcaacgcggcctttttacggttcctggccttttgctggccttttgctcacatgttctttcctgcgttatcccctgattctgtggataaccgtattaccgcctttgagtgagctgataccgctcgccgcagccgaacgaccgagcgcagcgagtcagtgagcgaggaagcggaagagcgcctgatgcggtattttctccttacgcatctgtgcggtatttcacaccgcatatatggtgcactctcagtacaatctgctctgatgccgcatagttaagccagtatacactccgctatcgctacgtgactgggtcatggctgcgccccgacacccgccaacacccgctgacgcgccctgacgggcttgtctgctcccggcatccgcttacagacaagctgtgaccgtctccgggagctgcatgtgtcagaggttttcaccgtcatcaccgaaacgcgcgaggcagctgcggtaaagctcatcagcgtggtcgtgaagcgattcacagatgtctgcctgttcatccgcgtccagctcgttgagtttctccagaagcgttaatgtctggcttctgataaagcgggccatgttaagggcggttttttcctgtttggtcactgatgcctccgtgtaagggggatttctgttcatgggggtaatgataccgatgaaacgagagaggatgctcacgatacgggttactgatgatgaacatgcccggttactggaacgttgtgagggtaaacaactggcggtatggatgcggcgggaccagagaaaaatcactcagggtcaatgccagcgcttcgttaatacagatgtaggtgttccacagggtagccagcagcatcctgcgatgcagatccggaacataatggtgcagggcgctgacttccgcgtttccagactttacgaaacacggaaaccgaagaccattcatgttgttgctcaggtcgcagacgttttgcagcagcagtcgcttcacgttcgctcgcgtatcggtgattcattctgctaaccagtaaggcaaccccgccagcctagccgggtcctcaacgacaggagcacgatcatgctagtcatgccccgcgcccaccggaaggagctgactgggttgaaggctctcaagggcatcggtcgagatcccggtgcctaatgagtgagctaacttacattaattgcgttgcgctcactgcccgctttccagtcgggaaacctgtcgtgccagctgcattaatgaatcggccaacgcgcggggagaggcggtttgcgtattgggcgccagggtggtttttcttttcaccagtgagacgggcaacagctgattgcccttcaccgcctggccctgagagagttgcagcaagcggtccacgctggtttgccccagcaggcgaaaatcctgtttgatggtggttaacggcgggatataacatgagctgtcttcggtatcgtcgtatcccactaccgagatgtccgcaccaacgcgcagcccggactcggtaatggcgcgcattgcgcccagcgccatctgatcgttggcaaccagcatcgcagtgggaacgatgccctcattcagcatttgcatggtttgttgaaaaccggacatggcactccagtcgccttcccgttccgctatcggctgaatttgattgcgagtgagatatttatgccagccagccagacgcagacgcgccgagacagaacttaatgggcccgctaacagcgcgatttgctggtgacccaatgcgaccagatgctccacgcccagtcgcgtaccgtcttcatgggagaaaataatactgttgatgggtgtctggtcagagacatcaagaaataacgccggaacattagtgcaggcagcttccacagcaatggcatcctggtcatccagcggatagttaatgatcagcccactgacgcgttgcgcgagaagattgtgcaccgccgctttacaggcttcgacgccgcttcgttctaccatcgacaccaccacgctggcacccagttgatcggcgcgagatttaatcgccgcgacaatttgcgacggcgcgtgcagggccagactggaggtggcaacgccaatcagcaacgactgtttgcccgccagttgttgtgccacgcggttgggaatgtaattcagctccgccatcgccgcttccactttttcccgcgttttcgcagaaacgtggctggcctggttcaccacgcgggaaacggtctgataagagacaccggcatactctgcgacatcgtataacgttactggtttcacattcaccaccctgaattgactctcttccgggcgctatcatgccataccgcgaaaggttttgcgccattcgatggtgtccgggatctcgacgctctcccttatgcgactcctgcattaggaagcagcccagtagtaggttgaggccgttgagcaccgccgccgcaaggaatggtgcatgcaaggagatggcgcccaacagtcccccggccacggggcctgccaccatacccacgccgaaacaagcgctcatgagcccgaagtggcgagcccgatcttccccatcggtgatgtcggcgatataggcgccagcaaccgcacctgtggcgccggtgatgccggccacgatgcgtccggcgtagaggatcgagatcgatctcgatcccgcgaaattaatacgactcactataggggaattgtgagcggataacaattcccctctagaaataattttgtttaactttaagaaggagatatacatatgcaccaccaccaccaccacggctatggccgcaaaaaacgccgccagcgccgccgcggctatccgtatgatgtgccggattatgccccatgccagccgatgaaacgtctgaccctgggcaacgatatcatggcggcggcggttcggatgaacatccagatgctgctggaggcggccgactatctggagcggcgggagagagaagctgaacatggttatgcctccatgttaccatacccgaaaaagaaacgtaaagtggggctcgagcccggggaaaaaccctataaatgccccgagtgtggtaagtcattctctcaaagcggggatttaagaagacaccagagaacccacaccggggaaaagccatataaatgccccgagtgcggcaaatcattcagccaaagtagcaacttagtaagacaccagcgcacccataccggggagaagccatataaatgtcccgagtgtggcaagtccttttctagatcagataatttagtaagacatcagagaacgcacaccggggagaagccctataaatgccctgaatgtggcaagagcttcagtactagcgggaatctcactgaacatcagcgaactcataccggggaaaagccttacaaatgccccgaatgtgggaagagtttcagccggtctgataagctgaccgaacaccagagaactcataccggggaaaaaccttataagtgtcccgagtgcggcaagagtttcagtcacaaaaacgcacttcagaatcatcagaggacacataccggtgagcagaaactcatctctgaagaagatctggaacaaaagttgatttcagaagaagatctggaacagaagctcatctctgaggaagatctgtaagcggccgcactcgagcaccaccaccaccaccaccaccactaattgattaatacctaggctgctaaacaaagcccgaaaggaagctgagttggctgctgccaccgctgagcaataactagcataaccccttggggcctctaaacgggtcttgaggggttttttgctgaaaggaggaactatatccggat

SEQ ID NO: 304 - DNA, 5896 bp, Artificial Sequence
  synthetic construct
tggcgaatgggacgcgccctgtagcggcgcattaagcgcggcgggtgtggtggttacgcgcagcgtgaccgctacacttgccagcgccctagcgcccgctcctttcgctttcttcccttcctttctcgccacgttcgccggctttccccgtcaagctctaaatcgggggctccctttagggttccgatttagtgctttacggcacctcgaccccaaaaaacttgattagggtgatggttcacgtagtgggccatcgccctgatagacggtttttcgccctttgacgttggagtccacgttctttaatagtggactcttgttccaaactggaacaacactcaaccctatctcggtctattcttttgatttataagggattttgccgatttcggcctattggttaaaaaatgagctgatttaacaaaaatttaacgcgaattttaacaaaatattaacgtttacaatttcaggtggcacttttcggggaaatgtgcgcggaacccctatttgtttatttttctaaatacattcaaatatgtatccgctcatgaattaattcttagaaaaactcatcgagcatcaaatgaaactgcaatttattcatatcaggattatcaataccatatttttgaaaaagccgtttctgtaatgaaggagaaaactcaccgaggcagttccataggatggcaagatcctggtatcggtctgcgattccgactcgtccaacatcaatacaacctattaatttcccctcgtcaaaaataaggttatcaagtgagaaatcaccatgagtgacgactgaatccggtgagaatggcaaaagtttatgcatttctttccagacttgttcaacaggccagccattacgctcgtcatcaaaatcactcgcatcaaccaaaccgttattcattcgtgattgcgcctgagcgagacgaaatacgcgatcgctgttaaaaggacaattacaaacaggaatcgaatgcaaccggcgcaggaacactgccagcgcatcaacaatattttcacctgaatcaggatattcttctaatacctggaatgctgttttcccggggatcgcagtggtgagtaaccatgcatcatcaggagtacggataaaatgcttgatggtcggaagaggcataaattccgtcagccagtttagtctgaccatctcatctgtaacatcattggcaacgctacctttgccatgtttcagaaacaactctggcgcatcgggcttcccatacaatcgatagattgtcgcacctgattgcccgacattatcgcgagcccatttatacccatataaatcagcatccatgttggaatttaatcgcggcctagagcaagacgtttcccgttgaatatggctcataacaccccttgtattactgtttatgtaagcagacagttttattgttcatgaccaaaatcccttaacgtgagttttcgttccactgagcgtcagaccccgtagaaaagatcaaaggatcttcttgagatcctttttttctgcgcgtaatctgctgcttgcaaacaaaaaaaccaccgctaccagcggtggtttgtttgccggatcaagagctaccaactctttttccgaaggtaactggcttcagcagagcgcagataccaaatactgtccttctagtgtagccgtagttaggccaccacttcaagaactctgtagcaccgcctacatacctcgctctgctaatcctgttaccagtggctgctgccagtggcgataagtcgtgtcttaccgggttggactcaagacgatagttaccggataaggcgcagcggtcgggctgaacggggggttcgtgcacacagcccagcttggagcgaacgacctacaccgaactgagatacctacagcgtgagctatgagaaagcgccacgcttcccgaagggagaaaggcggacaggtatccggtaagcggcagggtcggaacaggagagcgcacgagggagcttccagggggaaacgcctggtatctttatagtcctgtcgggtttcgccacctctgacttgagcgtcgatttttgtgatgctcgtcaggggggcggagcctatggaaaaacgccagcaacgcggcctttttacggttcctggccttttgctggccttttgctcacatgttctttcctgcgttatcccctgattctgtggataaccgtattaccgcctttgagtgagctgataccgctcgccgcagccgaacgaccgagcgcagcgagtcagtgagcgaggaagcggaagagcgcctgatgcggtattttctccttacgcatctgtgcggtatttcacaccgcatatatggtgcactctcagtacaatctgctctgatgccgcatagttaagccagtatacactccgctatcgctacgtgactgggtcatggctgcgccccgacacccgccaacacccgctgacgcgccctgacgggcttgtctgctcccggcatccgcttacagacaagctgtgaccgtctccgggagctgcatgtgtcagaggttttcaccgtcatcaccgaaacgcgcgaggcagctgcggtaaagctcatcagcgtggtcgtgaagcgattcacagatgtctgcctgttcatccgcgtccagctcgttgagtttctccagaagcgttaatgtctggcttctgataaagcgggccatgttaagggcggttttttcctgtttggtcactgatgcctccgtgtaagggggatttctgttcatgggggtaatgataccgatgaaacgagagaggatgctcacgatacgggttactgatgatgaacatgcccggttactggaacgttgtgagggtaaacaactggcggtatggatgcggcgggaccagagaaaaatcactcagggtcaatgccagcgcttcgttaatacagatgtaggtgttccacagggtagccagcagcatcctgcgatgcagatccggaacataatggtgcagggcgctgacttccgcgtttccagactttacgaaacacggaaaccgaagaccattcatgttgttgctcaggtcgcagacgttttgcagcagcagtcgcttcacgttcgctcgcgtatcggtgattcattctgctaaccagtaaggcaaccccgccagcctagccgggtcctcaacgacaggagcacgatcatgctagtcatgccccgcgcccaccggaaggagctgactgggttgaaggctctcaagggcatcggtcgagatcccggtgcctaatgagtgagctaacttacattaattgcgttgcgctcactgcccgctttccagtcgggaaacctgtcgtgccagctgcattaatgaatcggccaacgcgcggggagaggcggtttgcgtattgggcgccagggtggtttttcttttcaccagtgagacgggcaacagctgattgcccttcaccgcctggccctgagagagttgcagcaagcggtccacgctggtttgccccagcaggcgaaaatcctgtttgatggtggttaacggcgggatataacatgagctgtcttcggtatcgtcgtatcccactaccgagatgtccgcaccaacgcgcagcccggactcggtaatggcgcgcattgcgcccagcgccatctgatcgttggcaaccagcatcgcagtgggaacgatgccctcattcagcatttgcatggtttgttgaaaaccggacatggcactccagtcgccttcccgttccgctatcggctgaatttgattgcgagtgagatatttatgccagccagccagacgcagacgcgccgagacagaacttaatgggcccgctaacagcgcgatttgctggtgacccaatgcgaccagatgctccacgcccagtcgcgtaccgtcttcatgggagaaaataatactgttgatgggtgtctggtcagagacatcaagaaataacgccggaacattagtgcaggcagcttccacagcaatggcatcctggtcatccagcggatagttaatgatcagcccactgacgcgttgcgcgagaagattgtgcaccgccgctttacaggcttcgacgccgcttcgttctaccatcgacaccaccacgctggcacccagttgatcggcgcgagatttaatcgccgcgacaatttgcgacggcgcgtgcagggccagactggaggtggcaacgccaatcagcaacgactgtttgcccgccagttgttgtgccacgcggttgggaatgtaattcagctccgccatcgccgcttccactttttcccgcgttttcgcagaaacgtggctggcctggttcaccacgcgggaaacggtctgataagagacaccggcatactctgcgacatcgtataacgttactggtttcacattcaccaccctgaattgactctcttccgggcgctatcatgccataccgcgaaaggttttgcgccattcgatggtgtccgggatctcgacgctctcccttatgcgactcctgcattaggaagcagcccagtagtaggttgaggccgttgagcaccgccgccgcaaggaatggtgcatgcaaggagatggcgcccaacagtcccccggccacggggcctgccaccatacccacgccgaaacaagcgctcatgagcccgaagtggcgagcccgatcttccccatcggtgatgtcggcgatataggcgccagcaaccgcacctgtggcgccggtgatgccggccacgatgcgtccggcgtagaggatcgagatcgatctcgatcccgcgaaattaatacgactcactataggggaattgtgagcggataacaattcccctctagaaataattttgtttaactttaagaaggagatatacatatgcaccaccaccaccaccacggctatggccgcaaaaaacgccgccagcgccgccgcggctatccgtatgatgtgccggattatgccccatgccagccgatgaaacgtctgaccctgggcaacgatatcatggcggcggcggttcggatgaacatccagatgctgctggaggcggccgactatctggagcggcgggagagagaagctgaacatggttatgcctccatgttaccatacccgaaaaagaaacgtaaagtggggctcgagcccggggagaaaccttataaatgcccagaatgcgggaaatcgttcagtcaaagagcacatttagaaagacatcaacggacccacaccggggagaagccatacaagtgccctgaatgtggcaagtccttttcaagagccgataacctgacagaacaccaaaggacgcataccggggaaaaaccttataagtgtcccgagtgcggcaagagtttcagtcacaaaaacgcacttcagaatcatcagaggacacataccggggagaagccctataaatgtccagaatgtggaaagtcctttagcacgtcagggaacttagtaagacaccagcgaactcataccggggagaaaccttataaatgcccagaatgcgggaaatcgttcagtcaaagagcacatttagaaagacatcaacggacccacaccggggaaaaaccttacaagtgccctgagtgcggcaagagcttctctcaatcaagttcattagtaagacaccagaggactcataccggtgagcagaaactcatctctgaagaagatctggaacaaaagttgatttcagaagaagatctggaacagaagctcatctctgaggaagatctgtaagcggccgcactcgagcaccaccaccaccaccaccaccactaattgattaatacctaggctgctaaacaaagcccgaaaggaagctgagttggctgctgccaccgctgagcaataactagcataaccccttggggcctctaaacgggtcttgaggggttttttgctgaaaggaggaactatatccggat

SEQ ID NO: 305 - DNA, 5896 bp, Artificial Sequence
  synthetic construt
tggcgaatgggacgcgccctgtagcggcgcattaagcgcggcgggtgtggtggttacgcgcagcgtgaccgctacacttgccagcgccctagcgcccgctcctttcgctttcttcccttcctttctcgccacgttcgccggctttccccgtcaagctctaaatcgggggctccctttagggttccgatttagtgctttacggcacctcgaccccaaaaaacttgattagggtgatggttcacgtagtgggccatcgccctgatagacggtttttcgccctttgacgttggagtccacgttctttaatagtggactcttgttccaaactggaacaacactcaaccctatctcggtctattcttttgatttataagggattttgccgatttcggcctattggttaaaaaatgagctgatttaacaaaaatttaacgcgaattttaacaaaatattaacgtttacaatttcaggtggcacttttcggggaaatgtgcgcggaacccctatttgtttatttttctaaatacattcaaatatgtatccgctcatgaattaattcttagaaaaactcatcgagcatcaaatgaaactgcaatttattcatatcaggattatcaataccatatttttgaaaaagccgtttctgtaatgaaggagaaaactcaccgaggcagttccataggatggcaagatcctggtatcggtctgcgattccgactcgtccaacatcaatacaacctattaatttcccctcgtcaaaaataaggttatcaagtgagaaatcaccatgagtgacgactgaatccggtgagaatggcaaaagtttatgcatttctttccagacttgttcaacaggccagccattacgctcgtcatcaaaatcactcgcatcaaccaaaccgttattcattcgtgattgcgcctgagcgagacgaaatacgcgatcgctgttaaaaggacaattacaaacaggaatcgaatgcaaccggcgcaggaacactgccagcgcatcaacaatattttcacctgaatcaggatattcttctaatacctggaatgctgttttcccggggatcgcagtggtgagtaaccatgcatcatcaggagtacggataaaatgcttgatggtcggaagaggcataaattccgtcagccagtttagtctgaccatctcatctgtaacatcattggcaacgctacctttgccatgtttcagaaacaactctggcgcatcgggcttcccatacaatcgatagattgtcgcacctgattgcccgacattatcgcgagcccatttatacccatataaatcagcatccatgttggaatttaatcgcggcctagagcaagacgtttcccgttgaatatggctcataacaccccttgtattactgtttatgtaagcagacagttttattgttcatgaccaaaatcccttaacgtgagttttcgttccactgagcgtcagaccccgtagaaaagatcaaaggatcttcttgagatcctttttttctgcgcgtaatctgctgcttgcaaacaaaaaaaccaccgctaccagcggtggtttgtttgccggatcaagagctaccaactctttttccgaaggtaactggcttcagcagagcgcagataccaaatactgtccttctagtgtagccgtagttaggccaccacttcaagaactctgtagcaccgcctacatacctcgctctgctaatcctgttaccagtggctgctgccagtggcgataagtcgtgtcttaccgggttggactcaagacgatagttaccggataaggcgcagcggtcgggctgaacggggggttcgtgcacacagcccagcttggagcgaacgacctacaccgaactgagatacctacagcgtgagctatgagaaagcgccacgcttcccgaagggagaaaggcggacaggtatccggtaagcggcagggtcggaacaggagagcgcacgagggagcttccagggggaaacgcctggtatctttatagtcctgtcgggtttcgccacctctgacttgagcgtcgatttttgtgatgctcgtcaggggggcggagcctatggaaaaacgccagcaacgcggcctttttacggttcctggccttttgctggccttttgctcacatgttctttcctgcgttatcccctgattctgtggataaccgtattaccgcctttgagtgagctgataccgctcgccgcagccgaacgaccgagcgcagcgagtcagtgagcgaggaagcggaagagcgcctgatgcggtattttctccttacgcatctgtgcggtatttcacaccgcatatatggtgcactctcagtacaatctgctctgatgccgcatagttaagccagtatacactccgctatcgctacgtgactgggtcatggctgcgccccgacacccgccaacacccgctgacgcgccctgacgggcttgtctgctcccggcatccgcttacagacaagctgtgaccgtctccgggagctgcatgtgtcagaggttttcaccgtcatcaccgaaacgcgcgaggcagctgcggtaaagctcatcagcgtggtcgtgaagcgattcacagatgtctgcctgttcatccgcgtccagctcgttgagtttctccagaagcgttaatgtctggcttctgataaagcgggccatgttaagggcggttttttcctgtttggtcactgatgcctccgtgtaagggggatttctgttcatgggggtaatgataccgatgaaacgagagaggatgctcacgatacgggttactgatgatgaacatgcccggttactggaacgttgtgagggtaaacaactggcggtatggatgcggcgggaccagagaaaaatcactcagggtcaatgccagcgcttcgttaatacagatgtaggtgttccacagggtagccagcagcatcctgcgatgcagatccggaacataatggtgcagggcgctgacttccgcgtttccagactttacgaaacacggaaaccgaagaccattcatgttgttgctcaggtcgcagacgttttgcagcagcagtcgcttcacgttcgctcgcgtatcggtgattcattctgctaaccagtaaggcaaccccgccagcctagccgggtcctcaacgacaggagcacgatcatgctagtcatgccccgcgcccaccggaaggagctgactgggttgaaggctctcaagggcatcggtcgagatcccggtgcctaatgagtgagctaacttacattaattgcgttgcgctcactgcccgctttccagtcgggaaacctgtcgtgccagctgcattaatgaatcggccaacgcgcggggagaggcggtttgcgtattgggcgccagggtggtttttcttttcaccagtgagacgggcaacagctgattgcccttcaccgcctggccctgagagagttgcagcaagcggtccacgctggtttgccccagcaggcgaaaatcctgtttgatggtggttaacggcgggatataacatgagctgtcttcggtatcgtcgtatcccactaccgagatgtccgcaccaacgcgcagcccggactcggtaatggcgcgcattgcgcccagcgccatctgatcgttggcaaccagcatcgcagtgggaacgatgccctcattcagcatttgcatggtttgttgaaaaccggacatggcactccagtcgccttcccgttccgctatcggctgaatttgattgcgagtgagatatttatgccagccagccagacgcagacgcgccgagacagaacttaatgggcccgctaacagcgcgatttgctggtgacccaatgcgaccagatgctccacgcccagtcgcgtaccgtcttcatgggagaaaataatactgttgatgggtgtctggtcagagacatcaagaaataacgccggaacattagtgcaggcagcttccacagcaatggcatcctggtcatccagcggatagttaatgatcagcccactgacgcgttgcgcgagaagattgtgcaccgccgctttacaggcttcgacgccgcttcgttctaccatcgacaccaccacgctggcacccagttgatcggcgcgagatttaatcgccgcgacaatttgcgacggcgcgtgcagggccagactggaggtggcaacgccaatcagcaacgactgtttgcccgccagttgttgtgccacgcggttgggaatgtaattcagctccgccatcgccgcttccactttttcccgcgttttcgcagaaacgtggctggcctggttcaccacgcgggaaacggtctgataagagacaccggcatactctgcgacatcgtataacgttactggtttcacattcaccaccctgaattgactctcttccgggcgctatcatgccataccgcgaaaggttttgcgccattcgatggtgtccgggatctcgacgctctcccttatgcgactcctgcattaggaagcagcccagtagtaggttgaggccgttgagcaccgccgccgcaaggaatggtgcatgcaaggagatggcgcccaacagtcccccggccacggggcctgccaccatacccacgccgaaacaagcgctcatgagcccgaagtggcgagcccgatcttccccatcggtgatgtcggcgatataggcgccagcaaccgcacctgtggcgccggtgatgccggccacgatgcgtccggcgtagaggatcgagatcgatctcgatcccgcgaaattaatacgactcactataggggaattgtgagcggataacaattcccctctagaaataattttgtttaactttaagaaggagatatacatatgcaccaccaccaccaccacggctatggccgcaaaaaacgccgccagcgccgccgcggctatccgtatgatgtgccggattatgccccatgccagccgatgaaacgtctgaccctgggcaacgatatcatggcggcggcggttcggatgaacatccagatgctgctggaggcggccgactatctggagcggcgggagagagaagctgaacatggttatgcctccatgttaccatacccgaaaaagaaacgtaaagtggggctcgagcccggggagaagccctataaatgtccagaatgtggaaagtcctttagcacgtcagggaacttagtaagacaccagcgaactcataccggggagaagccatacaagtgccctgaatgtggcaagtccttttcaagagccgataacctgacagaacaccaaaggacgcataccggggaaaaaccttataagtgtcccgagtgcggcaagagtttcagtcacaaaaacgcacttcagaatcatcagaggacacataccggggaaaagccctacaagtgtcctgagtgcggaaagtctttctccactagcggttcattagtaagacaccagaggacacacaccggggagaaaccttataaatgcccagaatgcgggaaatcgttcagtcaaagagcacatttagaaagacatcaacggacccacaccggggagaaaccatacaaatgccccgagtgtggaaagtcatttagtgatccaggcgcattagtaagacatcagcggacacataccggtgagcagaaactcatctctgaagaagatctggaacaaaagttgatttcagaagaagatctggaacagaagctcatctctgaggaagatctgtaagcggccgcactcgagcaccaccaccaccaccaccaccactaattgattaatacctaggctgctaaacaaagcccgaaaggaagctgagttggctgctgccaccgctgagcaataactagcataaccccttggggcctctaaacgggtcttgaggggttttttgctgaaaggaggaactatatccggat

SEQ ID NO: 306 - DNA, 5896 bp, Artificial Sequence
  synthetic construct
tggcgaatgggacgcgccctgtagcggcgcattaagcgcggcgggtgtggtggttacgcgcagcgtgaccgctacacttgccagcgccctagcgcccgctcctttcgctttcttcccttcctttctcgccacgttcgccggctttccccgtcaagctctaaatcgggggctccctttagggttccgatttagtgctttacggcacctcgaccccaaaaaacttgattagggtgatggttcacgtagtgggccatcgccctgatagacggtttttcgccctttgacgttggagtccacgttctttaatagtggactcttgttccaaactggaacaacactcaaccctatctcggtctattcttttgatttataagggattttgccgatttcggcctattggttaaaaaatgagctgatttaacaaaaatttaacgcgaattttaacaaaatattaacgtttacaatttcaggtggcacttttcggggaaatgtgcgcggaacccctatttgtttatttttctaaatacattcaaatatgtatccgctcatgaattaattcttagaaaaactcatcgagcatcaaatgaaactgcaatttattcatatcaggattatcaataccatatttttgaaaaagccgtttctgtaatgaaggagaaaactcaccgaggcagttccataggatggcaagatcctggtatcggtctgcgattccgactcgtccaacatcaatacaacctattaatttcccctcgtcaaaaataaggttatcaagtgagaaatcaccatgagtgacgactgaatccggtgagaatggcaaaagtttatgcatttctttccagacttgttcaacaggccagccattacgctcgtcatcaaaatcactcgcatcaaccaaaccgttattcattcgtgattgcgcctgagcgagacgaaatacgcgatcgctgttaaaaggacaattacaaacaggaatcgaatgcaaccggcgcaggaacactgccagcgcatcaacaatattttcacctgaatcaggatattcttctaatacctggaatgctgttttcccggggatcgcagtggtgagtaaccatgcatcatcaggagtacggataaaatgcttgatggtcggaagaggcataaattccgtcagccagtttagtctgaccatctcatctgtaacatcattggcaacgctacctttgccatgtttcagaaacaactctggcgcatcgggcttcccatacaatcgatagattgtcgcacctgattgcccgacattatcgcgagcccatttatacccatataaatcagcatccatgttggaatttaatcgcggcctagagcaagacgtttcccgttgaatatggctcataacaccccttgtattactgtttatgtaagcagacagttttattgttcatgaccaaaatcccttaacgtgagttttcgttccactgagcgtcagaccccgtagaaaagatcaaaggatcttcttgagatcctttttttctgcgcgtaatctgctgcttgcaaacaaaaaaaccaccgctaccagcggtggtttgtttgccggatcaagagctaccaactctttttccgaaggtaactggcttcagcagagcgcagataccaaatactgtccttctagtgtagccgtagttaggccaccacttcaagaactctgtagcaccgcctacatacctcgctctgctaatcctgttaccagtggctgctgccagtggcgataagtcgtgtcttaccgggttggactcaagacgatagttaccggataaggcgcagcggtcgggctgaacggggggttcgtgcacacagcccagcttggagcgaacgacctacaccgaactgagatacctacagcgtgagctatgagaaagcgccacgcttcccgaagggagaaaggcggacaggtatccggtaagcggcagggtcggaacaggagagcgcacgagggagcttccagggggaaacgcctggtatctttatagtcctgtcgggtttcgccacctctgacttgagcgtcgatttttgtgatgctcgtcaggggggcggagcctatggaaaaacgccagcaacgcggcctttttacggttcctggccttttgctggccttttgctcacatgttctttcctgcgttatcccctgattctgtggataaccgtattaccgcctttgagtgagctgataccgctcgccgcagccgaacgaccgagcgcagcgagtcagtgagcgaggaagcggaagagcgcctgatgcggtattttctccttacgcatctgtgcggtatttcacaccgcatatatggtgcactctcagtacaatctgctctgatgccgcatagttaagccagtatacactccgctatcgctacgtgactgggtcatggctgcgccccgacacccgccaacacccgctgacgcgccctgacgggcttgtctgctcccggcatccgcttacagacaagctgtgaccgtctccgggagctgcatgtgtcagaggttttcaccgtcatcaccgaaacgcgcgaggcagctgcggtaaagctcatcagcgtggtcgtgaagcgattcacagatgtctgcctgttcatccgcgtccagctcgttgagtttctccagaagcgttaatgtctggcttctgataaagcgggccatgttaagggcggttttttcctgtttggtcactgatgcctccgtgtaagggggatttctgttcatgggggtaatgataccgatgaaacgagagaggatgctcacgatacgggttactgatgatgaacatgcccggttactggaacgttgtgagggtaaacaactggcggtatggatgcggcgggaccagagaaaaatcactcagggtcaatgccagcgcttcgttaatacagatgtaggtgttccacagggtagccagcagcatcctgcgatgcagatccggaacataatggtgcagggcgctgacttccgcgtttccagactttacgaaacacggaaaccgaagaccattcatgttgttgctcaggtcgcagacgttttgcagcagcagtcgcttcacgttcgctcgcgtatcggtgattcattctgctaaccagtaaggcaaccccgccagcctagccgggtcctcaacgacaggagcacgatcatgctagtcatgccccgcgcccaccggaaggagctgactgggttgaaggctctcaagggcatcggtcgagatcccggtgcctaatgagtgagctaacttacattaattgcgttgcgctcactgcccgctttccagtcgggaaacctgtcgtgccagctgcattaatgaatcggccaacgcgcggggagaggcggtttgcgtattgggcgccagggtggtttttcttttcaccagtgagacgggcaacagctgattgcccttcaccgcctggccctgagagagttgcagcaagcggtccacgctggtttgccccagcaggcgaaaatcctgtttgatggtggttaacggcgggatataacatgagctgtcttcggtatcgtcgtatcccactaccgagatgtccgcaccaacgcgcagcccggactcggtaatggcgcgcattgcgcccagcgccatctgatcgttggcaaccagcatcgcagtgggaacgatgccctcattcagcatttgcatggtttgttgaaaaccggacatggcactccagtcgccttcccgttccgctatcggctgaatttgattgcgagtgagatatttatgccagccagccagacgcagacgcgccgagacagaacttaatgggcccgctaacagcgcgatttgctggtgacccaatgcgaccagatgctccacgcccagtcgcgtaccgtcttcatgggagaaaataatactgttgatgggtgtctggtcagagacatcaagaaataacgccggaacattagtgcaggcagcttccacagcaatggcatcctggtcatccagcggatagttaatgatcagcccactgacgcgttgcgcgagaagattgtgcaccgccgctttacaggcttcgacgccgcttcgttctaccatcgacaccaccacgctggcacccagttgatcggcgcgagatttaatcgccgcgacaatttgcgacggcgcgtgcagggccagactggaggtggcaacgccaatcagcaacgactgtttgcccgccagttgttgtgccacgcggttgggaatgtaattcagctccgccatcgccgcttccactttttcccgcgttttcgcagaaacgtggctggcctggttcaccacgcgggaaacggtctgataagagacaccggcatactctgcgacatcgtataacgttactggtttcacattcaccaccctgaattgactctcttccgggcgctatcatgccataccgcgaaaggttttgcgccattcgatggtgtccgggatctcgacgctctcccttatgcgactcctgcattaggaagcagcccagtagtaggttgaggccgttgagcaccgccgccgcaaggaatggtgcatgcaaggagatggcgcccaacagtcccccggccacggggcctgccaccatacccacgccgaaacaagcgctcatgagcccgaagtggcgagcccgatcttccccatcggtgatgtcggcgatataggcgccagcaaccgcacctgtggcgccggtgatgccggccacgatgcgtccggcgtagaggatcgagatcgatctcgatcccgcgaaattaatacgactcactataggggaattgtgagcggataacaattcccctctagaaataattttgtttaactttaagaaggagatatacatatgcaccaccaccaccaccacggctatggccgcaaaaaacgccgccagcgccgccgcggctatccgtatgatgtgccggattatgccccatgccagccgatgaaacgtctgaccctgggcaacgatatcatggcggcggcggttcggatgaacatccagatgctgctggaggcggccgactatctggagcggcgggagagagaagctgaacatggttatgcctccatgttaccatacccgaaaaagaaacgtaaagtggggctcgagcccggggagaagccctataaatgtccagaatgtggaaagtcctttagcacgtcagggaacttagtaagacaccagcgaactcataccggggagaagccatacaagtgccctgaatgtggcaagtccttttcaagagccgataacctgacagaacaccaaaggacgcataccggggaaaaaccttataagtgtcccgagtgcggcaagagtttcagtcacaaaaacgcacttcagaatcatcagaggacacataccggggaaaaaccctataaatgccccgagtgtggtaagtcattctctcaaagcggggatttaagaagacaccagagaacccacaccggggagaaaccttataaatgcccagaatgcgggaaatcgttcagtcaaagagcacatttagaaagacatcaacggacccacaccggggaaaaaccttacaagtgccctgagtgcggcaagagcttctctcaatcaagttcattagtaagacaccagaggactcataccggtgagcagaaactcatctctgaagaagatctggaacaaaagttgatttcagaagaagatctggaacagaagctcatctctgaggaagatctgtaagcggccgcactcgagcaccaccaccaccaccaccaccactaattgattaatacctaggctgctaaacaaagcccgaaaggaagctgagttggctgctgccaccgctgagcaataactagcataaccccttggggcctctaaacgggtcttgaggggttttttgctgaaaggaggaactatatccggat

SEQ ID NO: 307 - DNA, 5896 bp, Artificial Sequence
  synthetic construct
tggcgaatgggacgcgccctgtagcggcgcattaagcgcggcgggtgtggtggttacgcgcagcgtgaccgctacacttgccagcgccctagcgcccgctcctttcgctttcttcccttcctttctcgccacgttcgccggctttccccgtcaagctctaaatcgggggctccctttagggttccgatttagtgctttacggcacctcgaccccaaaaaacttgattagggtgatggttcacgtagtgggccatcgccctgatagacggtttttcgccctttgacgttggagtccacgttctttaatagtggactcttgttccaaactggaacaacactcaaccctatctcggtctattcttttgatttataagggattttgccgatttcggcctattggttaaaaaatgagctgatttaacaaaaatttaacgcgaattttaacaaaatattaacgtttacaatttcaggtggcacttttcggggaaatgtgcgcggaacccctatttgtttatttttctaaatacattcaaatatgtatccgctcatgaattaattcttagaaaaactcatcgagcatcaaatgaaactgcaatttattcatatcaggattatcaataccatatttttgaaaaagccgtttctgtaatgaaggagaaaactcaccgaggcagttccataggatggcaagatcctggtatcggtctgcgattccgactcgtccaacatcaatacaacctattaatttcccctcgtcaaaaataaggttatcaagtgagaaatcaccatgagtgacgactgaatccggtgagaatggcaaaagtttatgcatttctttccagacttgttcaacaggccagccattacgctcgtcatcaaaatcactcgcatcaaccaaaccgttattcattcgtgattgcgcctgagcgagacgaaatacgcgatcgctgttaaaaggacaattacaaacaggaatcgaatgcaaccggcgcaggaacactgccagcgcatcaacaatattttcacctgaatcaggatattcttctaatacctggaatgctgttttcccggggatcgcagtggtgagtaaccatgcatcatcaggagtacggataaaatgcttgatggtcggaagaggcataaattccgtcagccagtttagtctgaccatctcatctgtaacatcattggcaacgctacctttgccatgtttcagaaacaactctggcgcatcgggcttcccatacaatcgatagattgtcgcacctgattgcccgacattatcgcgagcccatttatacccatataaatcagcatccatgttggaatttaatcgcggcctagagcaagacgtttcccgttgaatatggctcataacaccccttgtattactgtttatgtaagcagacagttttattgttcatgaccaaaatcccttaacgtgagttttcgttccactgagcgtcagaccccgtagaaaagatcaaaggatcttcttgagatcctttttttctgcgcgtaatctgctgcttgcaaacaaaaaaaccaccgctaccagcggtggtttgtttgccggatcaagagctaccaactctttttccgaaggtaactggcttcagcagagcgcagataccaaatactgtccttctagtgtagccgtagttaggccaccacttcaagaactctgtagcaccgcctacatacctcgctctgctaatcctgttaccagtggctgctgccagtggcgataagtcgtgtcttaccgggttggactcaagacgatagttaccggataaggcgcagcggtcgggctgaacggggggttcgtgcacacagcccagcttggagcgaacgacctacaccgaactgagatacctacagcgtgagctatgagaaagcgccacgcttcccgaagggagaaaggcggacaggtatccggtaagcggcagggtcggaacaggagagcgcacgagggagcttccagggggaaacgcctggtatctttatagtcctgtcgggtttcgccacctctgacttgagcgtcgatttttgtgatgctcgtcaggggggcggagcctatggaaaaacgccagcaacgcggcctttttacggttcctggccttttgctggccttttgctcacatgttctttcctgcgttatcccctgattctgtggataaccgtattaccgcctttgagtgagctgataccgctcgccgcagccgaacgaccgagcgcagcgagtcagtgagcgaggaagcggaagagcgcctgatgcggtattttctccttacgcatctgtgcggtatttcacaccgcatatatggtgcactctcagtacaatctgctctgatgccgcatagttaagccagtatacactccgctatcgctacgtgactgggtcatggctgcgccccgacacccgccaacacccgctgacgcgccctgacgggcttgtctgctcccggcatccgcttacagacaagctgtgaccgtctccgggagctgcatgtgtcagaggttttcaccgtcatcaccgaaacgcgcgaggcagctgcggtaaagctcatcagcgtggtcgtgaagcgattcacagatgtctgcctgttcatccgcgtccagctcgttgagtttctccagaagcgttaatgtctggcttctgataaagcgggccatgttaagggcggttttttcctgtttggtcactgatgcctccgtgtaagggggatttctgttcatgggggtaatgataccgatgaaacgagagaggatgctcacgatacgggttactgatgatgaacatgcccggttactggaacgttgtgagggtaaacaactggcggtatggatgcggcgggaccagagaaaaatcactcagggtcaatgccagcgcttcgttaatacagatgtaggtgttccacagggtagccagcagcatcctgcgatgcagatccggaacataatggtgcagggcgctgacttccgcgtttccagactttacgaaacacggaaaccgaagaccattcatgttgttgctcaggtcgcagacgttttgcagcagcagtcgcttcacgttcgctcgcgtatcggtgattcattctgctaaccagtaaggcaaccccgccagcctagccgggtcctcaacgacaggagcacgatcatgctagtcatgccccgcgcccaccggaaggagctgactgggttgaaggctctcaagggcatcggtcgagatcccggtgcctaatgagtgagctaacttacattaattgcgttgcgctcactgcccgctttccagtcgggaaacctgtcgtgccagctgcattaatgaatcggccaacgcgcggggagaggcggtttgcgtattgggcgccagggtggtttttcttttcaccagtgagacgggcaacagctgattgcccttcaccgcctggccctgagagagttgcagcaagcggtccacgctggtttgccccagcaggcgaaaatcctgtttgatggtggttaacggcgggatataacatgagctgtcttcggtatcgtcgtatcccactaccgagatgtccgcaccaacgcgcagcccggactcggtaatggcgcgcattgcgcccagcgccatctgatcgttggcaaccagcatcgcagtgggaacgatgccctcattcagcatttgcatggtttgttgaaaaccggacatggcactccagtcgccttcccgttccgctatcggctgaatttgattgcgagtgagatatttatgccagccagccagacgcagacgcgccgagacagaacttaatgggcccgctaacagcgcgatttgctggtgacccaatgcgaccagatgctccacgcccagtcgcgtaccgtcttcatgggagaaaataatactgttgatgggtgtctggtcagagacatcaagaaataacgccggaacattagtgcaggcagcttccacagcaatggcatcctggtcatccagcggatagttaatgatcagcccactgacgcgttgcgcgagaagattgtgcaccgccgctttacaggcttcgacgccgcttcgttctaccatcgacaccaccacgctggcacccagttgatcggcgcgagatttaatcgccgcgacaatttgcgacggcgcgtgcagggccagactggaggtggcaacgccaatcagcaacgactgtttgcccgccagttgttgtgccacgcggttgggaatgtaattcagctccgccatcgccgcttccactttttcccgcgttttcgcagaaacgtggctggcctggttcaccacgcgggaaacggtctgataagagacaccggcatactctgcgacatcgtataacgttactggtttcacattcaccaccctgaattgactctcttccgggcgctatcatgccataccgcgaaaggttttgcgccattcgatggtgtccgggatctcgacgctctcccttatgcgactcctgcattaggaagcagcccagtagtaggttgaggccgttgagcaccgccgccgcaaggaatggtgcatgcaaggagatggcgcccaacagtcccccggccacggggcctgccaccatacccacgccgaaacaagcgctcatgagcccgaagtggcgagcccgatcttccccatcggtgatgtcggcgatataggcgccagcaaccgcacctgtggcgccggtgatgccggccacgatgcgtccggcgtagaggatcgagatcgatctcgatcccgcgaaattaatacgactcactataggggaattgtgagcggataacaattcccctctagaaataattttgtttaactttaagaaggagatatacatatgcaccaccaccaccaccacggctatggccgcaaaaaacgccgccagcgccgccgcggctatccgtatgatgtgccggattatgccccatgccagccgatgaaacgtctgaccctgggcaacgatatcatggcggcggcggttcggatgaacatccagatgctgctggaggcggccgactatctggagcggcgggagagagaagctgaacatggttatgcctccatgttaccatacccgaaaaagaaacgtaaagtggggctcgagcccggggagaagccttataagtgccctgagtgtggcaaaagcttcagcgatcctggaaatttagtaagacaccaacgcacccacaccggggagaagccatataaatgtcccgagtgtggcaagtccttttctagatcagataatttagtaagacatcagagaacgcacaccggggaaaagccctacaagtgtcctgagtgcggaaagtctttctccactagcggttcattagtaagacaccagaggacacacaccggggaaaaaccgtacaagtgtcctgagtgcgggaagagtttctccgatccgggccacttagtaagacatcagaggacacataccggggaaaaaccttacaagtgccctgagtgcggcaagagcttctctcaatcaagttcattagtaagacaccagaggactcataccggggaaaaaccgtacaagtgtcctgagtgcgggaagagtttctccgatccgggccacttagtaagacatcagaggacacataccggtgagcagaaactcatctctgaagaagatctggaacaaaagttgatttcagaagaagatctggaacagaagctcatctctgaggaagatctgtaagcggccgcactcgagcaccaccaccaccaccaccaccactaattgattaatacctaggctgctaaacaaagcccgaaaggaagctgagttggctgctgccaccgctgagcaataactagcataaccccttggggcctctaaacgggtcttgaggggttttttgctgaaaggaggaactatatccggat

SEQ ID NO: 308 - DNA, 5896 bp, Artificial Sequence
  synthetic construct
tggcgaatgggacgcgccctgtagcggcgcattaagcgcggcgggtgtggtggttacgcgcagcgtgaccgctacacttgccagcgccctagcgcccgctcctttcgctttcttcccttcctttctcgccacgttcgccggctttccccgtcaagctctaaatcgggggctccctttagggttccgatttagtgctttacggcacctcgaccccaaaaaacttgattagggtgatggttcacgtagtgggccatcgccctgatagacggtttttcgccctttgacgttggagtccacgttctttaatagtggactcttgttccaaactggaacaacactcaaccctatctcggtctattcttttgatttataagggattttgccgatttcggcctattggttaaaaaatgagctgatttaacaaaaatttaacgcgaattttaacaaaatattaacgtttacaatttcaggtggcacttttcggggaaatgtgcgcggaacccctatttgtttatttttctaaatacattcaaatatgtatccgctcatgaattaattcttagaaaaactcatcgagcatcaaatgaaactgcaatttattcatatcaggattatcaataccatatttttgaaaaagccgtttctgtaatgaaggagaaaactcaccgaggcagttccataggatggcaagatcctggtatcggtctgcgattccgactcgtccaacatcaatacaacctattaatttcccctcgtcaaaaataaggttatcaagtgagaaatcaccatgagtgacgactgaatccggtgagaatggcaaaagtttatgcatttctttccagacttgttcaacaggccagccattacgctcgtcatcaaaatcactcgcatcaaccaaaccgttattcattcgtgattgcgcctgagcgagacgaaatacgcgatcgctgttaaaaggacaattacaaacaggaatcgaatgcaaccggcgcaggaacactgccagcgcatcaacaatattttcacctgaatcaggatattcttctaatacctggaatgctgttttcccggggatcgcagtggtgagtaaccatgcatcatcaggagtacggataaaatgcttgatggtcggaagaggcataaattccgtcagccagtttagtctgaccatctcatctgtaacatcattggcaacgctacctttgccatgtttcagaaacaactctggcgcatcgggcttcccatacaatcgatagattgtcgcacctgattgcccgacattatcgcgagcccatttatacccatataaatcagcatccatgttggaatttaatcgcggcctagagcaagacgtttcccgttgaatatggctcataacaccccttgtattactgtttatgtaagcagacagttttattgttcatgaccaaaatcccttaacgtgagttttcgttccactgagcgtcagaccccgtagaaaagatcaaaggatcttcttgagatcctttttttctgcgcgtaatctgctgcttgcaaacaaaaaaaccaccgctaccagcggtggtttgtttgccggatcaagagctaccaactctttttccgaaggtaactggcttcagcagagcgcagataccaaatactgtccttctagtgtagccgtagttaggccaccacttcaagaactctgtagcaccgcctacatacctcgctctgctaatcctgttaccagtggctgctgccagtggcgataagtcgtgtcttaccgggttggactcaagacgatagttaccggataaggcgcagcggtcgggctgaacggggggttcgtgcacacagcccagcttggagcgaacgacctacaccgaactgagatacctacagcgtgagctatgagaaagcgccacgcttcccgaagggagaaaggcggacaggtatccggtaagcggcagggtcggaacaggagagcgcacgagggagcttccagggggaaacgcctggtatctttatagtcctgtcgggtttcgccacctctgacttgagcgtcgatttttgtgatgctcgtcaggggggcggagcctatggaaaaacgccagcaacgcggcctttttacggttcctggccttttgctggccttttgctcacatgttctttcctgcgttatcccctgattctgtggataaccgtattaccgcctttgagtgagctgataccgctcgccgcagccgaacgaccgagcgcagcgagtcagtgagcgaggaagcggaagagcgcctgatgcggtattttctccttacgcatctgtgcggtatttcacaccgcatatatggtgcactctcagtacaatctgctctgatgccgcatagttaagccagtatacactccgctatcgctacgtgactgggtcatggctgcgccccgacacccgccaacacccgctgacgcgccctgacgggcttgtctgctcccggcatccgcttacagacaagctgtgaccgtctccgggagctgcatgtgtcagaggttttcaccgtcatcaccgaaacgcgcgaggcagctgcggtaaagctcatcagcgtggtcgtgaagcgattcacagatgtctgcctgttcatccgcgtccagctcgttgagtttctccagaagcgttaatgtctggcttctgataaagcgggccatgttaagggcggttttttcctgtttggtcactgatgcctccgtgtaagggggatttctgttcatgggggtaatgataccgatgaaacgagagaggatgctcacgatacgggttactgatgatgaacatgcccggttactggaacgttgtgagggtaaacaactggcggtatggatgcggcgggaccagagaaaaatcactcagggtcaatgccagcgcttcgttaatacagatgtaggtgttccacagggtagccagcagcatcctgcgatgcagatccggaacataatggtgcagggcgctgacttccgcgtttccagactttacgaaacacggaaaccgaagaccattcatgttgttgctcaggtcgcagacgttttgcagcagcagtcgcttcacgttcgctcgcgtatcggtgattcattctgctaaccagtaaggcaaccccgccagcctagccgggtcctcaacgacaggagcacgatcatgctagtcatgccccgcgcccaccggaaggagctgactgggttgaaggctctcaagggcatcggtcgagatcccggtgcctaatgagtgagctaacttacattaattgcgttgcgctcactgcccgctttccagtcgggaaacctgtcgtgccagctgcattaatgaatcggccaacgcgcggggagaggcggtttgcgtattgggcgccagggtggtttttcttttcaccagtgagacgggcaacagctgattgcccttcaccgcctggccctgagagagttgcagcaagcggtccacgctggtttgccccagcaggcgaaaatcctgtttgatggtggttaacggcgggatataacatgagctgtcttcggtatcgtcgtatcccactaccgagatgtccgcaccaacgcgcagcccggactcggtaatggcgcgcattgcgcccagcgccatctgatcgttggcaaccagcatcgcagtgggaacgatgccctcattcagcatttgcatggtttgttgaaaaccggacatggcactccagtcgccttcccgttccgctatcggctgaatttgattgcgagtgagatatttatgccagccagccagacgcagacgcgccgagacagaacttaatgggcccgctaacagcgcgatttgctggtgacccaatgcgaccagatgctccacgcccagtcgcgtaccgtcttcatgggagaaaataatactgttgatgggtgtctggtcagagacatcaagaaataacgccggaacattagtgcaggcagcttccacagcaatggcatcctggtcatccagcggatagttaatgatcagcccactgacgcgttgcgcgagaagattgtgcaccgccgctttacaggcttcgacgccgcttcgttctaccatcgacaccaccacgctggcacccagttgatcggcgcgagatttaatcgccgcgacaatttgcgacggcgcgtgcagggccagactggaggtggcaacgccaatcagcaacgactgtttgcccgccagttgttgtgccacgcggttgggaatgtaattcagctccgccatcgccgcttccactttttcccgcgttttcgcagaaacgtggctggcctggttcaccacgcgggaaacggtctgataagagacaccggcatactctgcgacatcgtataacgttactggtttcacattcaccaccctgaattgactctcttccgggcgctatcatgccataccgcgaaaggttttgcgccattcgatggtgtccgggatctcgacgctctcccttatgcgactcctgcattaggaagcagcccagtagtaggttgaggccgttgagcaccgccgccgcaaggaatggtgcatgcaaggagatggcgcccaacagtcccccggccacggggcctgccaccatacccacgccgaaacaagcgctcatgagcccgaagtggcgagcccgatcttccccatcggtgatgtcggcgatataggcgccagcaaccgcacctgtggcgccggtgatgccggccacgatgcgtccggcgtagaggatcgagatcgatctcgatcccgcgaaattaatacgactcactataggggaattgtgagcggataacaattcccctctagaaataattttgtttaactttaagaaggagatatacatatgcaccaccaccaccaccacggctatggccgcaaaaaacgccgccagcgccgccgcggctatccgtatgatgtgccggattatgccccatgccagccgatgaaacgtctgaccctgggcaacgatatcatggcggcggcggttcggatgaacatccagatgctgctggaggcggccgactatctggagcggcgggagagagaagctgaacatggttatgcctccatgttaccatacccgaaaaagaaacgtaaagtggggctcgagcccggggagaagccttataagtgccctgagtgtggcaaaagcttcagcgatcctggaaatttagtaagacaccaacgcacccacaccggggagaagccatataaatgtcccgagtgtggcaagtccttttctagatcagataatttagtaagacatcagagaacgcacaccggggaaaaaccgtacaagtgtcctgagtgcgggaagagtttctccgatccgggccacttagtaagacatcagaggacacataccggggaaaaaccgtacaagtgtcctgagtgcgggaagagtttctccgatccgggccacttagtaagacatcagaggacacataccggggaaaaaccttacaagtgccctgagtgcggcaagagcttctctcaatcaagttcattagtaagacaccagaggactcataccggggaaaaaccgtacaagtgtcctgagtgcgggaagagtttctccgatccgggccacttagtaagacatcagaggacacataccggtgagcagaaactcatctctgaagaagatctggaacaaaagttgatttcagaagaagatctggaacagaagctcatctctgaggaagatctgtaagcggccgcactcgagcaccaccaccaccaccaccaccactaattgattaatacctaggctgctaaacaaagcccgaaaggaagctgagttggctgctgccaccgctgagcaataactagcataaccccttggggcctctaaacgggtcttgaggggttttttgctgaaaggaggaactatatccggat

SEQ ID NO: 309 - DNA, 5896 bp, Artificial Sequence
  synthetic construct
tggcgaatgggacgcgccctgtagcggcgcattaagcgcggcgggtgtggtggttacgcgcagcgtgaccgctacacttgccagcgccctagcgcccgctcctttcgctttcttcccttcctttctcgccacgttcgccggctttccccgtcaagctctaaatcgggggctccctttagggttccgatttagtgctttacggcacctcgaccccaaaaaacttgattagggtgatggttcacgtagtgggccatcgccctgatagacggtttttcgccctttgacgttggagtccacgttctttaatagtggactcttgttccaaactggaacaacactcaaccctatctcggtctattcttttgatttataagggattttgccgatttcggcctattggttaaaaaatgagctgatttaacaaaaatttaacgcgaattttaacaaaatattaacgtttacaatttcaggtggcacttttcggggaaatgtgcgcggaacccctatttgtttatttttctaaatacattcaaatatgtatccgctcatgaattaattcttagaaaaactcatcgagcatcaaatgaaactgcaatttattcatatcaggattatcaataccatatttttgaaaaagccgtttctgtaatgaaggagaaaactcaccgaggcagttccataggatggcaagatcctggtatcggtctgcgattccgactcgtccaacatcaatacaacctattaatttcccctcgtcaaaaataaggttatcaagtgagaaatcaccatgagtgacgactgaatccggtgagaatggcaaaagtttatgcatttctttccagacttgttcaacaggccagccattacgctcgtcatcaaaatcactcgcatcaaccaaaccgttattcattcgtgattgcgcctgagcgagacgaaatacgcgatcgctgttaaaaggacaattacaaacaggaatcgaatgcaaccggcgcaggaacactgccagcgcatcaacaatattttcacctgaatcaggatattcttctaatacctggaatgctgttttcccggggatcgcagtggtgagtaaccatgcatcatcaggagtacggataaaatgcttgatggtcggaagaggcataaattccgtcagccagtttagtctgaccatctcatctgtaacatcattggcaacgctacctttgccatgtttcagaaacaactctggcgcatcgggcttcccatacaatcgatagattgtcgcacctgattgcccgacattatcgcgagcccatttatacccatataaatcagcatccatgttggaatttaatcgcggcctagagcaagacgtttcccgttgaatatggctcataacaccccttgtattactgtttatgtaagcagacagttttattgttcatgaccaaaatcccttaacgtgagttttcgttccactgagcgtcagaccccgtagaaaagatcaaaggatcttcttgagatcctttttttctgcgcgtaatctgctgcttgcaaacaaaaaaaccaccgctaccagcggtggtttgtttgccggatcaagagctaccaactctttttccgaaggtaactggcttcagcagagcgcagataccaaatactgtccttctagtgtagccgtagttaggccaccacttcaagaactctgtagcaccgcctacatacctcgctctgctaatcctgttaccagtggctgctgccagtggcgataagtcgtgtcttaccgggttggactcaagacgatagttaccggataaggcgcagcggtcgggctgaacggggggttcgtgcacacagcccagcttggagcgaacgacctacaccgaactgagatacctacagcgtgagctatgagaaagcgccacgcttcccgaagggagaaaggcggacaggtatccggtaagcggcagggtcggaacaggagagcgcacgagggagcttccagggggaaacgcctggtatctttatagtcctgtcgggtttcgccacctctgacttgagcgtcgatttttgtgatgctcgtcaggggggcggagcctatggaaaaacgccagcaacgcggcctttttacggttcctggccttttgctggccttttgctcacatgttctttcctgcgttatcccctgattctgtggataaccgtattaccgcctttgagtgagctgataccgctcgccgcagccgaacgaccgagcgcagcgagtcagtgagcgaggaagcggaagagcgcctgatgcggtattttctccttacgcatctgtgcggtatttcacaccgcatatatggtgcactctcagtacaatctgctctgatgccgcatagttaagccagtatacactccgctatcgctacgtgactgggtcatggctgcgccccgacacccgccaacacccgctgacgcgccctgacgggcttgtctgctcccggcatccgcttacagacaagctgtgaccgtctccgggagctgcatgtgtcagaggttttcaccgtcatcaccgaaacgcgcgaggcagctgcggtaaagctcatcagcgtggtcgtgaagcgattcacagatgtctgcctgttcatccgcgtccagctcgttgagtttctccagaagcgttaatgtctggcttctgataaagcgggccatgttaagggcggttttttcctgtttggtcactgatgcctccgtgtaagggggatttctgttcatgggggtaatgataccgatgaaacgagagaggatgctcacgatacgggttactgatgatgaacatgcccggttactggaacgttgtgagggtaaacaactggcggtatggatgcggcgggaccagagaaaaatcactcagggtcaatgccagcgcttcgttaatacagatgtaggtgttccacagggtagccagcagcatcctgcgatgcagatccggaacataatggtgcagggcgctgacttccgcgtttccagactttacgaaacacggaaaccgaagaccattcatgttgttgctcaggtcgcagacgttttgcagcagcagtcgcttcacgttcgctcgcgtatcggtgattcattctgctaaccagtaaggcaaccccgccagcctagccgggtcctcaacgacaggagcacgatcatgctagtcatgccccgcgcccaccggaaggagctgactgggttgaaggctctcaagggcatcggtcgagatcccggtgcctaatgagtgagctaacttacattaattgcgttgcgctcactgcccgctttccagtcgggaaacctgtcgtgccagctgcattaatgaatcggccaacgcgcggggagaggcggtttgcgtattgggcgccagggtggtttttcttttcaccagtgagacgggcaacagctgattgcccttcaccgcctggccctgagagagttgcagcaagcggtccacgctggtttgccccagcaggcgaaaatcctgtttgatggtggttaacggcgggatataacatgagctgtcttcggtatcgtcgtatcccactaccgagatgtccgcaccaacgcgcagcccggactcggtaatggcgcgcattgcgcccagcgccatctgatcgttggcaaccagcatcgcagtgggaacgatgccctcattcagcatttgcatggtttgttgaaaaccggacatggcactccagtcgccttcccgttccgctatcggctgaatttgattgcgagtgagatatttatgccagccagccagacgcagacgcgccgagacagaacttaatgggcccgctaacagcgcgatttgctggtgacccaatgcgaccagatgctccacgcccagtcgcgtaccgtcttcatgggagaaaataatactgttgatgggtgtctggtcagagacatcaagaaataacgccggaacattagtgcaggcagcttccacagcaatggcatcctggtcatccagcggatagttaatgatcagcccactgacgcgttgcgcgagaagattgtgcaccgccgctttacaggcttcgacgccgcttcgttctaccatcgacaccaccacgctggcacccagttgatcggcgcgagatttaatcgccgcgacaatttgcgacggcgcgtgcagggccagactggaggtggcaacgccaatcagcaacgactgtttgcccgccagttgttgtgccacgcggttgggaatgtaattcagctccgccatcgccgcttccactttttcccgcgttttcgcagaaacgtggctggcctggttcaccacgcgggaaacggtctgataagagacaccggcatactctgcgacatcgtataacgttactggtttcacattcaccaccctgaattgactctcttccgggcgctatcatgccataccgcgaaaggttttgcgccattcgatggtgtccgggatctcgacgctctcccttatgcgactcctgcattaggaagcagcccagtagtaggttgaggccgttgagcaccgccgccgcaaggaatggtgcatgcaaggagatggcgcccaacagtcccccggccacggggcctgccaccatacccacgccgaaacaagcgctcatgagcccgaagtggcgagcccgatcttccccatcggtgatgtcggcgatataggcgccagcaaccgcacctgtggcgccggtgatgccggccacgatgcgtccggcgtagaggatcgagatcgatctcgatcccgcgaaattaatacgactcactataggggaattgtgagcggataacaattcccctctagaaataattttgtttaactttaagaaggagatatacatatgcaccaccaccaccaccacggctatggccgcaaaaaacgccgccagcgccgccgcggctatccgtatgatgtgccggattatgccccatgccagccgatgaaacgtctgaccctgggcaacgatatcatggcggcggcggttcggatgaacatccagatgctgctggaggcggccgactatctggagcggcgggagagagaagctgaacatggttatgcctccatgttaccatacccgaaaaagaaacgtaaagtggggctcgagcccggggagaagccatataaatgtcccgagtgtggcaagtccttttctagatcagataatttagtaagacatcagagaacgcacaccggggagaagccgtacaagtgccctgaatgtggtaagtcattttcgagaagtgatgaattagtaagacaccagcggactcataccggggagaagccttataagtgccctgagtgtggcaaaagcttcagcgatcctggaaatttagtaagacaccaacgcacccacaccggggagaaaccttataaatgcccagaatgcgggaaatcgttcagtcaaagagcacatttagaaagacatcaacggacccacaccggggagaaaccttataaatgcccagaatgcgggaaatcgttcagtcaaagagcacatttagaaagacatcaacggacccacaccggggaaaaaccttacaagtgccctgagtgcggcaagagcttctctcaatcaagttcattagtaagacaccagaggactcataccggtgagcagaaactcatctctgaagaagatctggaacaaaagttgatttcagaagaagatctggaacagaagctcatctctgaggaagatctgtaagcggccgcactcgagcaccaccaccaccaccaccaccactaattgattaatacctaggctgctaaacaaagcccgaaaggaagctgagttggctgctgccaccgctgagcaataactagcataaccccttggggcctctaaacgggtcttgaggggttttttgctgaaaggaggaactatatccggat

SEQ ID NO: 310 - DNA, 5896 bp, Artificial Sequence
  synthetic construct
tggcgaatgggacgcgccctgtagcggcgcattaagcgcggcgggtgtggtggttacgcgcagcgtgaccgctacacttgccagcgccctagcgcccgctcctttcgctttcttcccttcctttctcgccacgttcgccggctttccccgtcaagctctaaatcgggggctccctttagggttccgatttagtgctttacggcacctcgaccccaaaaaacttgattagggtgatggttcacgtagtgggccatcgccctgatagacggtttttcgccctttgacgttggagtccacgttctttaatagtggactcttgttccaaactggaacaacactcaaccctatctcggtctattcttttgatttataagggattttgccgatttcggcctattggttaaaaaatgagctgatttaacaaaaatttaacgcgaattttaacaaaatattaacgtttacaatttcaggtggcacttttcggggaaatgtgcgcggaacccctatttgtttatttttctaaatacattcaaatatgtatccgctcatgaattaattcttagaaaaactcatcgagcatcaaatgaaactgcaatttattcatatcaggattatcaataccatatttttgaaaaagccgtttctgtaatgaaggagaaaactcaccgaggcagttccataggatggcaagatcctggtatcggtctgcgattccgactcgtccaacatcaatacaacctattaatttcccctcgtcaaaaataaggttatcaagtgagaaatcaccatgagtgacgactgaatccggtgagaatggcaaaagtttatgcatttctttccagacttgttcaacaggccagccattacgctcgtcatcaaaatcactcgcatcaaccaaaccgttattcattcgtgattgcgcctgagcgagacgaaatacgcgatcgctgttaaaaggacaattacaaacaggaatcgaatgcaaccggcgcaggaacactgccagcgcatcaacaatattttcacctgaatcaggatattcttctaatacctggaatgctgttttcccggggatcgcagtggtgagtaaccatgcatcatcaggagtacggataaaatgcttgatggtcggaagaggcataaattccgtcagccagtttagtctgaccatctcatctgtaacatcattggcaacgctacctttgccatgtttcagaaacaactctggcgcatcgggcttcccatacaatcgatagattgtcgcacctgattgcccgacattatcgcgagcccatttatacccatataaatcagcatccatgttggaatttaatcgcggcctagagcaagacgtttcccgttgaatatggctcataacaccccttgtattactgtttatgtaagcagacagttttattgttcatgaccaaaatcccttaacgtgagttttcgttccactgagcgtcagaccccgtagaaaagatcaaaggatcttcttgagatcctttttttctgcgcgtaatctgctgcttgcaaacaaaaaaaccaccgctaccagcggtggtttgtttgccggatcaagagctaccaactctttttccgaaggtaactggcttcagcagagcgcagataccaaatactgtccttctagtgtagccgtagttaggccaccacttcaagaactctgtagcaccgcctacatacctcgctctgctaatcctgttaccagtggctgctgccagtggcgataagtcgtgtcttaccgggttggactcaagacgatagttaccggataaggcgcagcggtcgggctgaacggggggttcgtgcacacagcccagcttggagcgaacgacctacaccgaactgagatacctacagcgtgagctatgagaaagcgccacgcttcccgaagggagaaaggcggacaggtatccggtaagcggcagggtcggaacaggagagcgcacgagggagcttccagggggaaacgcctggtatctttatagtcctgtcgggtttcgccacctctgacttgagcgtcgatttttgtgatgctcgtcaggggggcggagcctatggaaaaacgccagcaacgcggcctttttacggttcctggccttttgctggccttttgctcacatgttctttcctgcgttatcccctgattctgtggataaccgtattaccgcctttgagtgagctgataccgctcgccgcagccgaacgaccgagcgcagcgagtcagtgagcgaggaagcggaagagcgcctgatgcggtattttctccttacgcatctgtgcggtatttcacaccgcatatatggtgcactctcagtacaatctgctctgatgccgcatagttaagccagtatacactccgctatcgctacgtgactgggtcatggctgcgccccgacacccgccaacacccgctgacgcgccctgacgggcttgtctgctcccggcatccgcttacagacaagctgtgaccgtctccgggagctgcatgtgtcagaggttttcaccgtcatcaccgaaacgcgcgaggcagctgcggtaaagctcatcagcgtggtcgtgaagcgattcacagatgtctgcctgttcatccgcgtccagctcgttgagtttctccagaagcgttaatgtctggcttctgataaagcgggccatgttaagggcggttttttcctgtttggtcactgatgcctccgtgtaagggggatttctgttcatgggggtaatgataccgatgaaacgagagaggatgctcacgatacgggttactgatgatgaacatgcccggttactggaacgttgtgagggtaaacaactggcggtatggatgcggcgggaccagagaaaaatcactcagggtcaatgccagcgcttcgttaatacagatgtaggtgttccacagggtagccagcagcatcctgcgatgcagatccggaacataatggtgcagggcgctgacttccgcgtttccagactttacgaaacacggaaaccgaagaccattcatgttgttgctcaggtcgcagacgttttgcagcagcagtcgcttcacgttcgctcgcgtatcggtgattcattctgctaaccagtaaggcaaccccgccagcctagccgggtcctcaacgacaggagcacgatcatgctagtcatgccccgcgcccaccggaaggagctgactgggttgaaggctctcaagggcatcggtcgagatcccggtgcctaatgagtgagctaacttacattaattgcgttgcgctcactgcccgctttccagtcgggaaacctgtcgtgccagctgcattaatgaatcggccaacgcgcggggagaggcggtttgcgtattgggcgccagggtggtttttcttttcaccagtgagacgggcaacagctgattgcccttcaccgcctggccctgagagagttgcagcaagcggtccacgctggtttgccccagcaggcgaaaatcctgtttgatggtggttaacggcgggatataacatgagctgtcttcggtatcgtcgtatcccactaccgagatgtccgcaccaacgcgcagcccggactcggtaatggcgcgcattgcgcccagcgccatctgatcgttggcaaccagcatcgcagtgggaacgatgccctcattcagcatttgcatggtttgttgaaaaccggacatggcactccagtcgccttcccgttccgctatcggctgaatttgattgcgagtgagatatttatgccagccagccagacgcagacgcgccgagacagaacttaatgggcccgctaacagcgcgatttgctggtgacccaatgcgaccagatgctccacgcccagtcgcgtaccgtcttcatgggagaaaataatactgttgatgggtgtctggtcagagacatcaagaaataacgccggaacattagtgcaggcagcttccacagcaatggcatcctggtcatccagcggatagttaatgatcagcccactgacgcgttgcgcgagaagattgtgcaccgccgctttacaggcttcgacgccgcttcgttctaccatcgacaccaccacgctggcacccagttgatcggcgcgagatttaatcgccgcgacaatttgcgacggcgcgtgcagggccagactggaggtggcaacgccaatcagcaacgactgtttgcccgccagttgttgtgccacgcggttgggaatgtaattcagctccgccatcgccgcttccactttttcccgcgttttcgcagaaacgtggctggcctggttcaccacgcgggaaacggtctgataagagacaccggcatactctgcgacatcgtataacgttactggtttcacattcaccaccctgaattgactctcttccgggcgctatcatgccataccgcgaaaggttttgcgccattcgatggtgtccgggatctcgacgctctcccttatgcgactcctgcattaggaagcagcccagtagtaggttgaggccgttgagcaccgccgccgcaaggaatggtgcatgcaaggagatggcgcccaacagtcccccggccacggggcctgccaccatacccacgccgaaacaagcgctcatgagcccgaagtggcgagcccgatcttccccatcggtgatgtcggcgatataggcgccagcaaccgcacctgtggcgccggtgatgccggccacgatgcgtccggcgtagaggatcgagatcgatctcgatcccgcgaaattaatacgactcactataggggaattgtgagcggataacaattcccctctagaaataattttgtttaactttaagaaggagatatacatatgcaccaccaccaccaccacggctatggccgcaaaaaacgccgccagcgccgccgcggctatccgtatgatgtgccggattatgccccatgccagccgatgaaacgtctgaccctgggcaacgatatcatggcggcggcggttcggatgaacatccagatgctgctggaggcggccgactatctggagcggcgggagagagaagctgaacatggttatgcctccatgttaccatacccgaaaaagaaacgtaaagtggggctcgagcccggggaaaaaccttacaagtgccctgagtgcggcaagagcttctctcaatcaagttcattagtaagacaccagaggactcataccggggagaagccctataaatgtccagaatgtggaaagtcctttagcacgtcagggaacttagtaagacaccagcgaactcataccggggagaagccgtacaagtgccctgaatgtggtaagtcattttcgagaagtgatgaattagtaagacaccagcggactcataccggggaaaagccctacaagtgcccggaatgcggcaagtcttttagcaccagcggacatttagtaagacaccagagaacccacaccggggagaagccctataaatgtccagaatgtggaaagtcctttagcacgtcagggaacttagtaagacaccagcgaactcataccggggagaagccgtacaagtgccctgaatgtggtaagtcattttcgagaagtgatgaattagtaagacaccagcggactcataccggtgagcagaaactcatctctgaagaagatctggaacaaaagttgatttcagaagaagatctggaacagaagctcatctctgaggaagatctgtaagcggccgcactcgagcaccaccaccaccaccaccaccactaattgattaatacctaggctgctaaacaaagcccgaaaggaagctgagttggctgctgccaccgctgagcaataactagcataaccccttggggcctctaaacgggtcttgaggggttttttgctgaaaggaggaactatatccggat

SEQ ID NO: 311 - DNA, 5896 bp, Artificial Sequence
  synthetic construct
tggcgaatgggacgcgccctgtagcggcgcattaagcgcggcgggtgtggtggttacgcgcagcgtgaccgctacacttgccagcgccctagcgcccgctcctttcgctttcttcccttcctttctcgccacgttcgccggctttccccgtcaagctctaaatcgggggctccctttagggttccgatttagtgctttacggcacctcgaccccaaaaaacttgattagggtgatggttcacgtagtgggccatcgccctgatagacggtttttcgccctttgacgttggagtccacgttctttaatagtggactcttgttccaaactggaacaacactcaaccctatctcggtctattcttttgatttataagggattttgccgatttcggcctattggttaaaaaatgagctgatttaacaaaaatttaacgcgaattttaacaaaatattaacgtttacaatttcaggtggcacttttcggggaaatgtgcgcggaacccctatttgtttatttttctaaatacattcaaatatgtatccgctcatgaattaattcttagaaaaactcatcgagcatcaaatgaaactgcaatttattcatatcaggattatcaataccatatttttgaaaaagccgtttctgtaatgaaggagaaaactcaccgaggcagttccataggatggcaagatcctggtatcggtctgcgattccgactcgtccaacatcaatacaacctattaatttcccctcgtcaaaaataaggttatcaagtgagaaatcaccatgagtgacgactgaatccggtgagaatggcaaaagtttatgcatttctttccagacttgttcaacaggccagccattacgctcgtcatcaaaatcactcgcatcaaccaaaccgttattcattcgtgattgcgcctgagcgagacgaaatacgcgatcgctgttaaaaggacaattacaaacaggaatcgaatgcaaccggcgcaggaacactgccagcgcatcaacaatattttcacctgaatcaggatattcttctaatacctggaatgctgttttcccggggatcgcagtggtgagtaaccatgcatcatcaggagtacggataaaatgcttgatggtcggaagaggcataaattccgtcagccagtttagtctgaccatctcatctgtaacatcattggcaacgctacctttgccatgtttcagaaacaactctggcgcatcgggcttcccatacaatcgatagattgtcgcacctgattgcccgacattatcgcgagcccatttatacccatataaatcagcatccatgttggaatttaatcgcggcctagagcaagacgtttcccgttgaatatggctcataacaccccttgtattactgtttatgtaagcagacagttttattgttcatgaccaaaatcccttaacgtgagttttcgttccactgagcgtcagaccccgtagaaaagatcaaaggatcttcttgagatcctttttttctgcgcgtaatctgctgcttgcaaacaaaaaaaccaccgctaccagcggtggtttgtttgccggatcaagagctaccaactctttttccgaaggtaactggcttcagcagagcgcagataccaaatactgtccttctagtgtagccgtagttaggccaccacttcaagaactctgtagcaccgcctacatacctcgctctgctaatcctgttaccagtggctgctgccagtggcgataagtcgtgtcttaccgggttggactcaagacgatagttaccggataaggcgcagcggtcgggctgaacggggggttcgtgcacacagcccagcttggagcgaacgacctacaccgaactgagatacctacagcgtgagctatgagaaagcgccacgcttcccgaagggagaaaggcggacaggtatccggtaagcggcagggtcggaacaggagagcgcacgagggagcttccagggggaaacgcctggtatctttatagtcctgtcgggtttcgccacctctgacttgagcgtcgatttttgtgatgctcgtcaggggggcggagcctatggaaaaacgccagcaacgcggcctttttacggttcctggccttttgctggccttttgctcacatgttctttcctgcgttatcccctgattctgtggataaccgtattaccgcctttgagtgagctgataccgctcgccgcagccgaacgaccgagcgcagcgagtcagtgagcgaggaagcggaagagcgcctgatgcggtattttctccttacgcatctgtgcggtatttcacaccgcatatatggtgcactctcagtacaatctgctctgatgccgcatagttaagccagtatacactccgctatcgctacgtgactgggtcatggctgcgccccgacacccgccaacacccgctgacgcgccctgacgggcttgtctgctcccggcatccgcttacagacaagctgtgaccgtctccgggagctgcatgtgtcagaggttttcaccgtcatcaccgaaacgcgcgaggcagctgcggtaaagctcatcagcgtggtcgtgaagcgattcacagatgtctgcctgttcatccgcgtccagctcgttgagtttctccagaagcgttaatgtctggcttctgataaagcgggccatgttaagggcggttttttcctgtttggtcactgatgcctccgtgtaagggggatttctgttcatgggggtaatgataccgatgaaacgagagaggatgctcacgatacgggttactgatgatgaacatgcccggttactggaacgttgtgagggtaaacaactggcggtatggatgcggcgggaccagagaaaaatcactcagggtcaatgccagcgcttcgttaatacagatgtaggtgttccacagggtagccagcagcatcctgcgatgcagatccggaacataatggtgcagggcgctgacttccgcgtttccagactttacgaaacacggaaaccgaagaccattcatgttgttgctcaggtcgcagacgttttgcagcagcagtcgcttcacgttcgctcgcgtatcggtgattcattctgctaaccagtaaggcaaccccgccagcctagccgggtcctcaacgacaggagcacgatcatgctagtcatgccccgcgcccaccggaaggagctgactgggttgaaggctctcaagggcatcggtcgagatcccggtgcctaatgagtgagctaacttacattaattgcgttgcgctcactgcccgctttccagtcgggaaacctgtcgtgccagctgcattaatgaatcggccaacgcgcggggagaggcggtttgcgtattgggcgccagggtggtttttcttttcaccagtgagacgggcaacagctgattgcccttcaccgcctggccctgagagagttgcagcaagcggtccacgctggtttgccccagcaggcgaaaatcctgtttgatggtggttaacggcgggatataacatgagctgtcttcggtatcgtcgtatcccactaccgagatgtccgcaccaacgcgcagcccggactcggtaatggcgcgcattgcgcccagcgccatctgatcgttggcaaccagcatcgcagtgggaacgatgccctcattcagcatttgcatggtttgttgaaaaccggacatggcactccagtcgccttcccgttccgctatcggctgaatttgattgcgagtgagatatttatgccagccagccagacgcagacgcgccgagacagaacttaatgggcccgctaacagcgcgatttgctggtgacccaatgcgaccagatgctccacgcccagtcgcgtaccgtcttcatgggagaaaataatactgttgatgggtgtctggtcagagacatcaagaaataacgccggaacattagtgcaggcagcttccacagcaatggcatcctggtcatccagcggatagttaatgatcagcccactgacgcgttgcgcgagaagattgtgcaccgccgctttacaggcttcgacgccgcttcgttctaccatcgacaccaccacgctggcacccagttgatcggcgcgagatttaatcgccgcgacaatttgcgacggcgcgtgcagggccagactggaggtggcaacgccaatcagcaacgactgtttgcccgccagttgttgtgccacgcggttgggaatgtaattcagctccgccatcgccgcttccactttttcccgcgttttcgcagaaacgtggctggcctggttcaccacgcgggaaacggtctgataagagacaccggcatactctgcgacatcgtataacgttactggtttcacattcaccaccctgaattgactctcttccgggcgctatcatgccataccgcgaaaggttttgcgccattcgatggtgtccgggatctcgacgctctcccttatgcgactcctgcattaggaagcagcccagtagtaggttgaggccgttgagcaccgccgccgcaaggaatggtgcatgcaaggagatggcgcccaacagtcccccggccacggggcctgccaccatacccacgccgaaacaagcgctcatgagcccgaagtggcgagcccgatcttccccatcggtgatgtcggcgatataggcgccagcaaccgcacctgtggcgccggtgatgccggccacgatgcgtccggcgtagaggatcgagatcgatctcgatcccgcgaaattaatacgactcactataggggaattgtgagcggataacaattcccctctagaaataattttgtttaactttaagaaggagatatacatatgcaccaccaccaccaccacggctatggccgcaaaaaacgccgccagcgccgccgcggctatccgtatgatgtgccggattatgccccatgccagccgatgaaacgtctgaccctgggcaacgatatcatggcggcggcggttcggatgaacatccagatgctgctggaggcggccgactatctggagcggcgggagagagaagctgaacatggttatgcctccatgttaccatacccgaaaaagaaacgtaaagtggggctcgagcccggggaaaaaccgtacaagtgtcctgagtgcgggaagagtttctccgatccgggccacttagtaagacatcagaggacacataccggggagaagccctataaatgtccagaatgtggaaagtcctttagcacgtcagggaacttagtaagacaccagcgaactcataccggggagaagccgtacaagtgccctgaatgtggtaagtcattttcgagaagtgatgaattagtaagacaccagcggactcataccggggaaaagccctacaagtgcccggaatgcggcaagtcttttagcaccagcggacatttagtaagacaccagagaacccacaccggggagaagccctataaatgtccagaatgtggaaagtcctttagcacgtcagggaacttagtaagacaccagcgaactcataccggggagaagccgtacaagtgccctgaatgtggtaagtcattttcgagaagtgatgaattagtaagacaccagcggactcataccggtgagcagaaactcatctctgaagaagatctggaacaaaagttgatttcagaagaagatctggaacagaagctcatctctgaggaagatctgtaagcggccgcactcgagcaccaccaccaccaccaccaccactaattgattaatacctaggctgctaaacaaagcccgaaaggaagctgagttggctgctgccaccgctgagcaataactagcataaccccttggggcctctaaacgggtcttgaggggttttttgctgaaaggaggaactatatccggat

SEQ ID NO: 312 - DNA, 5896 bp, Artificial Sequence
  synthetic construct
tggcgaatgggacgcgccctgtagcggcgcattaagcgcggcgggtgtggtggttacgcgcagcgtgaccgctacacttgccagcgccctagcgcccgctcctttcgctttcttcccttcctttctcgccacgttcgccggctttccccgtcaagctctaaatcgggggctccctttagggttccgatttagtgctttacggcacctcgaccccaaaaaacttgattagggtgatggttcacgtagtgggccatcgccctgatagacggtttttcgccctttgacgttggagtccacgttctttaatagtggactcttgttccaaactggaacaacactcaaccctatctcggtctattcttttgatttataagggattttgccgatttcggcctattggttaaaaaatgagctgatttaacaaaaatttaacgcgaattttaacaaaatattaacgtttacaatttcaggtggcacttttcggggaaatgtgcgcggaacccctatttgtttatttttctaaatacattcaaatatgtatccgctcatgaattaattcttagaaaaactcatcgagcatcaaatgaaactgcaatttattcatatcaggattatcaataccatatttttgaaaaagccgtttctgtaatgaaggagaaaactcaccgaggcagttccataggatggcaagatcctggtatcggtctgcgattccgactcgtccaacatcaatacaacctattaatttcccctcgtcaaaaataaggttatcaagtgagaaatcaccatgagtgacgactgaatccggtgagaatggcaaaagtttatgcatttctttccagacttgttcaacaggccagccattacgctcgtcatcaaaatcactcgcatcaaccaaaccgttattcattcgtgattgcgcctgagcgagacgaaatacgcgatcgctgttaaaaggacaattacaaacaggaatcgaatgcaaccggcgcaggaacactgccagcgcatcaacaatattttcacctgaatcaggatattcttctaatacctggaatgctgttttcccggggatcgcagtggtgagtaaccatgcatcatcaggagtacggataaaatgcttgatggtcggaagaggcataaattccgtcagccagtttagtctgaccatctcatctgtaacatcattggcaacgctacctttgccatgtttcagaaacaactctggcgcatcgggcttcccatacaatcgatagattgtcgcacctgattgcccgacattatcgcgagcccatttatacccatataaatcagcatccatgttggaatttaatcgcggcctagagcaagacgtttcccgttgaatatggctcataacaccccttgtattactgtttatgtaagcagacagttttattgttcatgaccaaaatcccttaacgtgagttttcgttccactgagcgtcagaccccgtagaaaagatcaaaggatcttcttgagatcctttttttctgcgcgtaatctgctgcttgcaaacaaaaaaaccaccgctaccagcggtggtttgtttgccggatcaagagctaccaactctttttccgaaggtaactggcttcagcagagcgcagataccaaatactgtccttctagtgtagccgtagttaggccaccacttcaagaactctgtagcaccgcctacatacctcgctctgctaatcctgttaccagtggctgctgccagtggcgataagtcgtgtcttaccgggttggactcaagacgatagttaccggataaggcgcagcggtcgggctgaacggggggttcgtgcacacagcccagcttggagcgaacgacctacaccgaactgagatacctacagcgtgagctatgagaaagcgccacgcttcccgaagggagaaaggcggacaggtatccggtaagcggcagggtcggaacaggagagcgcacgagggagcttccagggggaaacgcctggtatctttatagtcctgtcgggtttcgccacctctgacttgagcgtcgatttttgtgatgctcgtcaggggggcggagcctatggaaaaacgccagcaacgcggcctttttacggttcctggccttttgctggccttttgctcacatgttctttcctgcgttatcccctgattctgtggataaccgtattaccgcctttgagtgagctgataccgctcgccgcagccgaacgaccgagcgcagcgagtcagtgagcgaggaagcggaagagcgcctgatgcggtattttctccttacgcatctgtgcggtatttcacaccgcatatatggtgcactctcagtacaatctgctctgatgccgcatagttaagccagtatacactccgctatcgctacgtgactgggtcatggctgcgccccgacacccgccaacacccgctgacgcgccctgacgggcttgtctgctcccggcatccgcttacagacaagctgtgaccgtctccgggagctgcatgtgtcagaggttttcaccgtcatcaccgaaacgcgcgaggcagctgcggtaaagctcatcagcgtggtcgtgaagcgattcacagatgtctgcctgttcatccgcgtccagctcgttgagtttctccagaagcgttaatgtctggcttctgataaagcgggccatgttaagggcggttttttcctgtttggtcactgatgcctccgtgtaagggggatttctgttcatgggggtaatgataccgatgaaacgagagaggatgctcacgatacgggttactgatgatgaacatgcccggttactggaacgttgtgagggtaaacaactggcggtatggatgcggcgggaccagagaaaaatcactcagggtcaatgccagcgcttcgttaatacagatgtaggtgttccacagggtagccagcagcatcctgcgatgcagatccggaacataatggtgcagggcgctgacttccgcgtttccagactttacgaaacacggaaaccgaagaccattcatgttgttgctcaggtcgcagacgttttgcagcagcagtcgcttcacgttcgctcgcgtatcggtgattcattctgctaaccagtaaggcaaccccgccagcctagccgggtcctcaacgacaggagcacgatcatgctagtcatgccccgcgcccaccggaaggagctgactgggttgaaggctctcaagggcatcggtcgagatcccggtgcctaatgagtgagctaacttacattaattgcgttgcgctcactgcccgctttccagtcgggaaacctgtcgtgccagctgcattaatgaatcggccaacgcgcggggagaggcggtttgcgtattgggcgccagggtggtttttcttttcaccagtgagacgggcaacagctgattgcccttcaccgcctggccctgagagagttgcagcaagcggtccacgctggtttgccccagcaggcgaaaatcctgtttgatggtggttaacggcgggatataacatgagctgtcttcggtatcgtcgtatcccactaccgagatgtccgcaccaacgcgcagcccggactcggtaatggcgcgcattgcgcccagcgccatctgatcgttggcaaccagcatcgcagtgggaacgatgccctcattcagcatttgcatggtttgttgaaaaccggacatggcactccagtcgccttcccgttccgctatcggctgaatttgattgcgagtgagatatttatgccagccagccagacgcagacgcgccgagacagaacttaatgggcccgctaacagcgcgatttgctggtgacccaatgcgaccagatgctccacgcccagtcgcgtaccgtcttcatgggagaaaataatactgttgatgggtgtctggtcagagacatcaagaaataacgccggaacattagtgcaggcagcttccacagcaatggcatcctggtcatccagcggatagttaatgatcagcccactgacgcgttgcgcgagaagattgtgcaccgccgctttacaggcttcgacgccgcttcgttctaccatcgacaccaccacgctggcacccagttgatcggcgcgagatttaatcgccgcgacaatttgcgacggcgcgtgcagggccagactggaggtggcaacgccaatcagcaacgactgtttgcccgccagttgttgtgccacgcggttgggaatgtaattcagctccgccatcgccgcttccactttttcccgcgttttcgcagaaacgtggctggcctggttcaccacgcgggaaacggtctgataagagacaccggcatactctgcgacatcgtataacgttactggtttcacattcaccaccctgaattgactctcttccgggcgctatcatgccataccgcgaaaggttttgcgccattcgatggtgtccgggatctcgacgctctcccttatgcgactcctgcattaggaagcagcccagtagtaggttgaggccgttgagcaccgccgccgcaaggaatggtgcatgcaaggagatggcgcccaacagtcccccggccacggggcctgccaccatacccacgccgaaacaagcgctcatgagcccgaagtggcgagcccgatcttccccatcggtgatgtcggcgatataggcgccagcaaccgcacctgtggcgccggtgatgccggccacgatgcgtccggcgtagaggatcgagatcgatctcgatcccgcgaaattaatacgactcactataggggaattgtgagcggataacaattcccctctagaaataattttgtttaactttaagaaggagatatacatatgcaccaccaccaccaccacggctatggccgcaaaaaacgccgccagcgccgccgcggctatccgtatgatgtgccggattatgccccatgccagccgatgaaacgtctgaccctgggcaacgatatcatggcggcggcggttcggatgaacatccagatgctgctggaggcggccgactatctggagcggcgggagagagaagctgaacatggttatgcctccatgttaccatacccgaaaaagaaacgtaaagtggggctcgagcccggggagaagccatataaatgtcccgagtgtggcaagtccttttctagatcagataatttagtaagacatcagagaacgcacaccggggagaagccctacaagtgtccagaatgcggaaagagtttctccagaagtgacaaattagtaagacaccagagaacccataccggggagaagccctataaatgtccagaatgtggaaagtcctttagcacgtcagggaacttagtaagacaccagcgaactcataccggggaaaaaccgtacaagtgtcctgagtgcgggaagagtttctccgatccgggccacttagtaagacatcagaggacacataccggggagaaaccttataaatgcccagaatgcgggaaatcgttcagtcaaagagcacatttagaaagacatcaacggacccacaccggggaaaagccctacaagtgtcctgagtgcggaaagtctttctccactagcggttcattagtaagacaccagaggacacacaccggtgagcagaaactcatctctgaagaagatctggaacaaaagttgatttcagaagaagatctggaacagaagctcatctctgaggaagatctgtaagcggccgcactcgagcaccaccaccaccaccaccaccactaattgattaatacctaggctgctaaacaaagcccgaaaggaagctgagttggctgctgccaccgctgagcaataactagcataaccccttggggcctctaaacgggtcttgaggggttttttgctgaaaggaggaactatatccggat

SEQ ID NO: 313 - DNA, 5896 bp, Artificial Sequence
  synthetic construct
tggcgaatgggacgcgccctgtagcggcgcattaagcgcggcgggtgtggtggttacgcgcagcgtgaccgctacacttgccagcgccctagcgcccgctcctttcgctttcttcccttcctttctcgccacgttcgccggctttccccgtcaagctctaaatcgggggctccctttagggttccgatttagtgctttacggcacctcgaccccaaaaaacttgattagggtgatggttcacgtagtgggccatcgccctgatagacggtttttcgccctttgacgttggagtccacgttctttaatagtggactcttgttccaaactggaacaacactcaaccctatctcggtctattcttttgatttataagggattttgccgatttcggcctattggttaaaaaatgagctgatttaacaaaaatttaacgcgaattttaacaaaatattaacgtttacaatttcaggtggcacttttcggggaaatgtgcgcggaacccctatttgtttatttttctaaatacattcaaatatgtatccgctcatgaattaattcttagaaaaactcatcgagcatcaaatgaaactgcaatttattcatatcaggattatcaataccatatttttgaaaaagccgtttctgtaatgaaggagaaaactcaccgaggcagttccataggatggcaagatcctggtatcggtctgcgattccgactcgtccaacatcaatacaacctattaatttcccctcgtcaaaaataaggttatcaagtgagaaatcaccatgagtgacgactgaatccggtgagaatggcaaaagtttatgcatttctttccagacttgttcaacaggccagccattacgctcgtcatcaaaatcactcgcatcaaccaaaccgttattcattcgtgattgcgcctgagcgagacgaaatacgcgatcgctgttaaaaggacaattacaaacaggaatcgaatgcaaccggcgcaggaacactgccagcgcatcaacaatattttcacctgaatcaggatattcttctaatacctggaatgctgttttcccggggatcgcagtggtgagtaaccatgcatcatcaggagtacggataaaatgcttgatggtcggaagaggcataaattccgtcagccagtttagtctgaccatctcatctgtaacatcattggcaacgctacctttgccatgtttcagaaacaactctggcgcatcgggcttcccatacaatcgatagattgtcgcacctgattgcccgacattatcgcgagcccatttatacccatataaatcagcatccatgttggaatttaatcgcggcctagagcaagacgtttcccgttgaatatggctcataacaccccttgtattactgtttatgtaagcagacagttttattgttcatgaccaaaatcccttaacgtgagttttcgttccactgagcgtcagaccccgtagaaaagatcaaaggatcttcttgagatcctttttttctgcgcgtaatctgctgcttgcaaacaaaaaaaccaccgctaccagcggtggtttgtttgccggatcaagagctaccaactctttttccgaaggtaactggcttcagcagagcgcagataccaaatactgtccttctagtgtagccgtagttaggccaccacttcaagaactctgtagcaccgcctacatacctcgctctgctaatcctgttaccagtggctgctgccagtggcgataagtcgtgtcttaccgggttggactcaagacgatagttaccggataaggcgcagcggtcgggctgaacggggggttcgtgcacacagcccagcttggagcgaacgacctacaccgaactgagatacctacagcgtgagctatgagaaagcgccacgcttcccgaagggagaaaggcggacaggtatccggtaagcggcagggtcggaacaggagagcgcacgagggagcttccagggggaaacgcctggtatctttatagtcctgtcgggtttcgccacctctgacttgagcgtcgatttttgtgatgctcgtcaggggggcggagcctatggaaaaacgccagcaacgcggcctttttacggttcctggccttttgctggccttttgctcacatgttctttcctgcgttatcccctgattctgtggataaccgtattaccgcctttgagtgagctgataccgctcgccgcagccgaacgaccgagcgcagcgagtcagtgagcgaggaagcggaagagcgcctgatgcggtattttctccttacgcatctgtgcggtatttcacaccgcatatatggtgcactctcagtacaatctgctctgatgccgcatagttaagccagtatacactccgctatcgctacgtgactgggtcatggctgcgccccgacacccgccaacacccgctgacgcgccctgacgggcttgtctgctcccggcatccgcttacagacaagctgtgaccgtctccgggagctgcatgtgtcagaggttttcaccgtcatcaccgaaacgcgcgaggcagctgcggtaaagctcatcagcgtggtcgtgaagcgattcacagatgtctgcctgttcatccgcgtccagctcgttgagtttctccagaagcgttaatgtctggcttctgataaagcgggccatgttaagggcggttttttcctgtttggtcactgatgcctccgtgtaagggggatttctgttcatgggggtaatgataccgatgaaacgagagaggatgctcacgatacgggttactgatgatgaacatgcccggttactggaacgttgtgagggtaaacaactggcggtatggatgcggcgggaccagagaaaaatcactcagggtcaatgccagcgcttcgttaatacagatgtaggtgttccacagggtagccagcagcatcctgcgatgcagatccggaacataatggtgcagggcgctgacttccgcgtttccagactttacgaaacacggaaaccgaagaccattcatgttgttgctcaggtcgcagacgttttgcagcagcagtcgcttcacgttcgctcgcgtatcggtgattcattctgctaaccagtaaggcaaccccgccagcctagccgggtcctcaacgacaggagcacgatcatgctagtcatgccccgcgcccaccggaaggagctgactgggttgaaggctctcaagggcatcggtcgagatcccggtgcctaatgagtgagctaacttacattaattgcgttgcgctcactgcccgctttccagtcgggaaacctgtcgtgccagctgcattaatgaatcggccaacgcgcggggagaggcggtttgcgtattgggcgccagggtggtttttcttttcaccagtgagacgggcaacagctgattgcccttcaccgcctggccctgagagagttgcagcaagcggtccacgctggtttgccccagcaggcgaaaatcctgtttgatggtggttaacggcgggatataacatgagctgtcttcggtatcgtcgtatcccactaccgagatgtccgcaccaacgcgcagcccggactcggtaatggcgcgcattgcgcccagcgccatctgatcgttggcaaccagcatcgcagtgggaacgatgccctcattcagcatttgcatggtttgttgaaaaccggacatggcactccagtcgccttcccgttccgctatcggctgaatttgattgcgagtgagatatttatgccagccagccagacgcagacgcgccgagacagaacttaatgggcccgctaacagcgcgatttgctggtgacccaatgcgaccagatgctccacgcccagtcgcgtaccgtcttcatgggagaaaataatactgttgatgggtgtctggtcagagacatcaagaaataacgccggaacattagtgcaggcagcttccacagcaatggcatcctggtcatccagcggatagttaatgatcagcccactgacgcgttgcgcgagaagattgtgcaccgccgctttacaggcttcgacgccgcttcgttctaccatcgacaccaccacgctggcacccagttgatcggcgcgagatttaatcgccgcgacaatttgcgacggcgcgtgcagggccagactggaggtggcaacgccaatcagcaacgactgtttgcccgccagttgttgtgccacgcggttgggaatgtaattcagctccgccatcgccgcttccactttttcccgcgttttcgcagaaacgtggctggcctggttcaccacgcgggaaacggtctgataagagacaccggcatactctgcgacatcgtataacgttactggtttcacattcaccaccctgaattgactctcttccgggcgctatcatgccataccgcgaaaggttttgcgccattcgatggtgtccgggatctcgacgctctcccttatgcgactcctgcattaggaagcagcccagtagtaggttgaggccgttgagcaccgccgccgcaaggaatggtgcatgcaaggagatggcgcccaacagtcccccggccacggggcctgccaccatacccacgccgaaacaagcgctcatgagcccgaagtggcgagcccgatcttccccatcggtgatgtcggcgatataggcgccagcaaccgcacctgtggcgccggtgatgccggccacgatgcgtccggcgtagaggatcgagatcgatctcgatcccgcgaaattaatacgactcactataggggaattgtgagcggataacaattcccctctagaaataattttgtttaactttaagaaggagatatacatatgcaccaccaccaccaccacggctatggccgcaaaaaacgccgccagcgccgccgcggctatccgtatgatgtgccggattatgccccatgccagccgatgaaacgtctgaccctgggcaacgatatcatggcggcggcggttcggatgaacatccagatgctgctggaggcggccgactatctggagcggcgggagagagaagctgaacatggttatgcctccatgttaccatacccgaaaaagaaacgtaaagtggggctcgagcccggggagaagccttataagtgccctgagtgtggcaaaagcttcagcgatcctggaaatttagtaagacaccaacgcacccacaccggggagaagccatataaatgtcccgagtgtggcaagtccttttctagatcagataatttagtaagacatcagagaacgcacaccggggaaaagccctacaagtgcccggaatgcggcaagtcttttagcaccagcggacatttagtaagacaccagagaacccacaccggggaaaaaccgtacaagtgtcctgagtgcgggaagagtttctccgatccgggccacttagtaagacatcagaggacacataccggggagaaaccttataaatgcccagaatgcgggaaatcgttcagtcaaagagcacatttagaaagacatcaacggacccacaccggggaaaaaccgtacaagtgtcctgagtgcgggaagagtttctccgatccgggccacttagtaagacatcagaggacacataccggtgagcagaaactcatctctgaagaagatctggaacaaaagttgatttcagaagaagatctggaacagaagctcatctctgaggaagatctgtaagcggccgcactcgagcaccaccaccaccaccaccaccactaattgattaatacctaggctgctaaacaaagcccgaaaggaagctgagttggctgctgccaccgctgagcaataactagcataaccccttggggcctctaaacgggtcttgaggggttttttgctgaaaggaggaactatatccggat

SEQ ID NO: 314 - DNA, 5896 bp, Artificial Sequence
  synthetic construct
tggcgaatgggacgcgccctgtagcggcgcattaagcgcggcgggtgtggtggttacgcgcagcgtgaccgctacacttgccagcgccctagcgcccgctcctttcgctttcttcccttcctttctcgccacgttcgccggctttccccgtcaagctctaaatcgggggctccctttagggttccgatttagtgctttacggcacctcgaccccaaaaaacttgattagggtgatggttcacgtagtgggccatcgccctgatagacggtttttcgccctttgacgttggagtccacgttctttaatagtggactcttgttccaaactggaacaacactcaaccctatctcggtctattcttttgatttataagggattttgccgatttcggcctattggttaaaaaatgagctgatttaacaaaaatttaacgcgaattttaacaaaatattaacgtttacaatttcaggtggcacttttcggggaaatgtgcgcggaacccctatttgtttatttttctaaatacattcaaatatgtatccgctcatgaattaattcttagaaaaactcatcgagcatcaaatgaaactgcaatttattcatatcaggattatcaataccatatttttgaaaaagccgtttctgtaatgaaggagaaaactcaccgaggcagttccataggatggcaagatcctggtatcggtctgcgattccgactcgtccaacatcaatacaacctattaatttcccctcgtcaaaaataaggttatcaagtgagaaatcaccatgagtgacgactgaatccggtgagaatggcaaaagtttatgcatttctttccagacttgttcaacaggccagccattacgctcgtcatcaaaatcactcgcatcaaccaaaccgttattcattcgtgattgcgcctgagcgagacgaaatacgcgatcgctgttaaaaggacaattacaaacaggaatcgaatgcaaccggcgcaggaacactgccagcgcatcaacaatattttcacctgaatcaggatattcttctaatacctggaatgctgttttcccggggatcgcagtggtgagtaaccatgcatcatcaggagtacggataaaatgcttgatggtcggaagaggcataaattccgtcagccagtttagtctgaccatctcatctgtaacatcattggcaacgctacctttgccatgtttcagaaacaactctggcgcatcgggcttcccatacaatcgatagattgtcgcacctgattgcccgacattatcgcgagcccatttatacccatataaatcagcatccatgttggaatttaatcgcggcctagagcaagacgtttcccgttgaatatggctcataacaccccttgtattactgtttatgtaagcagacagttttattgttcatgaccaaaatcccttaacgtgagttttcgttccactgagcgtcagaccccgtagaaaagatcaaaggatcttcttgagatcctttttttctgcgcgtaatctgctgcttgcaaacaaaaaaaccaccgctaccagcggtggtttgtttgccggatcaagagctaccaactctttttccgaaggtaactggcttcagcagagcgcagataccaaatactgtccttctagtgtagccgtagttaggccaccacttcaagaactctgtagcaccgcctacatacctcgctctgctaatcctgttaccagtggctgctgccagtggcgataagtcgtgtcttaccgggttggactcaagacgatagttaccggataaggcgcagcggtcgggctgaacggggggttcgtgcacacagcccagcttggagcgaacgacctacaccgaactgagatacctacagcgtgagctatgagaaagcgccacgcttcccgaagggagaaaggcggacaggtatccggtaagcggcagggtcggaacaggagagcgcacgagggagcttccagggggaaacgcctggtatctttatagtcctgtcgggtttcgccacctctgacttgagcgtcgatttttgtgatgctcgtcaggggggcggagcctatggaaaaacgccagcaacgcggcctttttacggttcctggccttttgctggccttttgctcacatgttctttcctgcgttatcccctgattctgtggataaccgtattaccgcctttgagtgagctgataccgctcgccgcagccgaacgaccgagcgcagcgagtcagtgagcgaggaagcggaagagcgcctgatgcggtattttctccttacgcatctgtgcggtatttcacaccgcatatatggtgcactctcagtacaatctgctctgatgccgcatagttaagccagtatacactccgctatcgctacgtgactgggtcatggctgcgccccgacacccgccaacacccgctgacgcgccctgacgggcttgtctgctcccggcatccgcttacagacaagctgtgaccgtctccgggagctgcatgtgtcagaggttttcaccgtcatcaccgaaacgcgcgaggcagctgcggtaaagctcatcagcgtggtcgtgaagcgattcacagatgtctgcctgttcatccgcgtccagctcgttgagtttctccagaagcgttaatgtctggcttctgataaagcgggccatgttaagggcggttttttcctgtttggtcactgatgcctccgtgtaagggggatttctgttcatgggggtaatgataccgatgaaacgagagaggatgctcacgatacgggttactgatgatgaacatgcccggttactggaacgttgtgagggtaaacaactggcggtatggatgcggcgggaccagagaaaaatcactcagggtcaatgccagcgcttcgttaatacagatgtaggtgttccacagggtagccagcagcatcctgcgatgcagatccggaacataatggtgcagggcgctgacttccgcgtttccagactttacgaaacacggaaaccgaagaccattcatgttgttgctcaggtcgcagacgttttgcagcagcagtcgcttcacgttcgctcgcgtatcggtgattcattctgctaaccagtaaggcaaccccgccagcctagccgggtcctcaacgacaggagcacgatcatgctagtcatgccccgcgcccaccggaaggagctgactgggttgaaggctctcaagggcatcggtcgagatcccggtgcctaatgagtgagctaacttacattaattgcgttgcgctcactgcccgctttccagtcgggaaacctgtcgtgccagctgcattaatgaatcggccaacgcgcggggagaggcggtttgcgtattgggcgccagggtggtttttcttttcaccagtgagacgggcaacagctgattgcccttcaccgcctggccctgagagagttgcagcaagcggtccacgctggtttgccccagcaggcgaaaatcctgtttgatggtggttaacggcgggatataacatgagctgtcttcggtatcgtcgtatcccactaccgagatgtccgcaccaacgcgcagcccggactcggtaatggcgcgcattgcgcccagcgccatctgatcgttggcaaccagcatcgcagtgggaacgatgccctcattcagcatttgcatggtttgttgaaaaccggacatggcactccagtcgccttcccgttccgctatcggctgaatttgattgcgagtgagatatttatgccagccagccagacgcagacgcgccgagacagaacttaatgggcccgctaacagcgcgatttgctggtgacccaatgcgaccagatgctccacgcccagtcgcgtaccgtcttcatgggagaaaataatactgttgatgggtgtctggtcagagacatcaagaaataacgccggaacattagtgcaggcagcttccacagcaatggcatcctggtcatccagcggatagttaatgatcagcccactgacgcgttgcgcgagaagattgtgcaccgccgctttacaggcttcgacgccgcttcgttctaccatcgacaccaccacgctggcacccagttgatcggcgcgagatttaatcgccgcgacaatttgcgacggcgcgtgcagggccagactggaggtggcaacgccaatcagcaacgactgtttgcccgccagttgttgtgccacgcggttgggaatgtaattcagctccgccatcgccgcttccactttttcccgcgttttcgcagaaacgtggctggcctggttcaccacgcgggaaacggtctgataagagacaccggcatactctgcgacatcgtataacgttactggtttcacattcaccaccctgaattgactctcttccgggcgctatcatgccataccgcgaaaggttttgcgccattcgatggtgtccgggatctcgacgctctcccttatgcgactcctgcattaggaagcagcccagtagtaggttgaggccgttgagcaccgccgccgcaaggaatggtgcatgcaaggagatggcgcccaacagtcccccggccacggggcctgccaccatacccacgccgaaacaagcgctcatgagcccgaagtggcgagcccgatcttccccatcggtgatgtcggcgatataggcgccagcaaccgcacctgtggcgccggtgatgccggccacgatgcgtccggcgtagaggatcgagatcgatctcgatcccgcgaaattaatacgactcactataggggaattgtgagcggataacaattcccctctagaaataattttgtttaactttaagaaggagatatacatatgcaccaccaccaccaccacggctatggccgcaaaaaacgccgccagcgccgccgcggctatccgtatgatgtgccggattatgccccatgccagccgatgaaacgtctgaccctgggcaacgatatcatggcggcggcggttcggatgaacatccagatgctgctggaggcggccgactatctggagcggcgggagagagaagctgaacatggttatgcctccatgttaccatacccgaaaaagaaacgtaaagtggggctcgagcccggggaaaagccctacaagtgtcctgagtgcggaaagtctttctccactagcggttcattagtaagacaccagaggacacacaccggggaaaagccctacaagtgcccggaatgcggcaagtcttttagcaccagcggacatttagtaagacaccagagaacccacaccggggagaagccgtacaagtgccctgaatgtggtaagtcattttcgagaagtgatgaattagtaagacaccagcggactcataccggggaaaagccctacaagtgcccggaatgcggcaagtcttttagcaccagcggacatttagtaagacaccagagaacccacaccggggaaaagccatataaatgccccgagtgcggcaaatcattcagccaaagtagcaacttagtaagacaccagcgcacccataccggggagaagccgtacaagtgccctgaatgtggtaagtcattttcgagaagtgatgaattagtaagacaccagcggactcataccggtgagcagaaactcatctctgaagaagatctggaacaaaagttgatttcagaagaagatctggaacagaagctcatctctgaggaagatctgtaagcggccgcactcgagcaccaccaccaccaccaccaccactaattgattaatacctaggctgctaaacaaagcccgaaaggaagctgagttggctgctgccaccgctgagcaataactagcataaccccttggggcctctaaacgggtcttgaggggttttttgctgaaaggaggaactatatccggat

SEQ ID NO: 315 - DNA, 5896 bp, Artificial Sequence
  synthetic construct
tggcgaatgggacgcgccctgtagcggcgcattaagcgcggcgggtgtggtggttacgcgcagcgtgaccgctacacttgccagcgccctagcgcccgctcctttcgctttcttcccttcctttctcgccacgttcgccggctttccccgtcaagctctaaatcgggggctccctttagggttccgatttagtgctttacggcacctcgaccccaaaaaacttgattagggtgatggttcacgtagtgggccatcgccctgatagacggtttttcgccctttgacgttggagtccacgttctttaatagtggactcttgttccaaactggaacaacactcaaccctatctcggtctattcttttgatttataagggattttgccgatttcggcctattggttaaaaaatgagctgatttaacaaaaatttaacgcgaattttaacaaaatattaacgtttacaatttcaggtggcacttttcggggaaatgtgcgcggaacccctatttgtttatttttctaaatacattcaaatatgtatccgctcatgaattaattcttagaaaaactcatcgagcatcaaatgaaactgcaatttattcatatcaggattatcaataccatatttttgaaaaagccgtttctgtaatgaaggagaaaactcaccgaggcagttccataggatggcaagatcctggtatcggtctgcgattccgactcgtccaacatcaatacaacctattaatttcccctcgtcaaaaataaggttatcaagtgagaaatcaccatgagtgacgactgaatccggtgagaatggcaaaagtttatgcatttctttccagacttgttcaacaggccagccattacgctcgtcatcaaaatcactcgcatcaaccaaaccgttattcattcgtgattgcgcctgagcgagacgaaatacgcgatcgctgttaaaaggacaattacaaacaggaatcgaatgcaaccggcgcaggaacactgccagcgcatcaacaatattttcacctgaatcaggatattcttctaatacctggaatgctgttttcccggggatcgcagtggtgagtaaccatgcatcatcaggagtacggataaaatgcttgatggtcggaagaggcataaattccgtcagccagtttagtctgaccatctcatctgtaacatcattggcaacgctacctttgccatgtttcagaaacaactctggcgcatcgggcttcccatacaatcgatagattgtcgcacctgattgcccgacattatcgcgagcccatttatacccatataaatcagcatccatgttggaatttaatcgcggcctagagcaagacgtttcccgttgaatatggctcataacaccccttgtattactgtttatgtaagcagacagttttattgttcatgaccaaaatcccttaacgtgagttttcgttccactgagcgtcagaccccgtagaaaagatcaaaggatcttcttgagatcctttttttctgcgcgtaatctgctgcttgcaaacaaaaaaaccaccgctaccagcggtggtttgtttgccggatcaagagctaccaactctttttccgaaggtaactggcttcagcagagcgcagataccaaatactgtccttctagtgtagccgtagttaggccaccacttcaagaactctgtagcaccgcctacatacctcgctctgctaatcctgttaccagtggctgctgccagtggcgataagtcgtgtcttaccgggttggactcaagacgatagttaccggataaggcgcagcggtcgggctgaacggggggttcgtgcacacagcccagcttggagcgaacgacctacaccgaactgagatacctacagcgtgagctatgagaaagcgccacgcttcccgaagggagaaaggcggacaggtatccggtaagcggcagggtcggaacaggagagcgcacgagggagcttccagggggaaacgcctggtatctttatagtcctgtcgggtttcgccacctctgacttgagcgtcgatttttgtgatgctcgtcaggggggcggagcctatggaaaaacgccagcaacgcggcctttttacggttcctggccttttgctggccttttgctcacatgttctttcctgcgttatcccctgattctgtggataaccgtattaccgcctttgagtgagctgataccgctcgccgcagccgaacgaccgagcgcagcgagtcagtgagcgaggaagcggaagagcgcctgatgcggtattttctccttacgcatctgtgcggtatttcacaccgcatatatggtgcactctcagtacaatctgctctgatgccgcatagttaagccagtatacactccgctatcgctacgtgactgggtcatggctgcgccccgacacccgccaacacccgctgacgcgccctgacgggcttgtctgctcccggcatccgcttacagacaagctgtgaccgtctccgggagctgcatgtgtcagaggttttcaccgtcatcaccgaaacgcgcgaggcagctgcggtaaagctcatcagcgtggtcgtgaagcgattcacagatgtctgcctgttcatccgcgtccagctcgttgagtttctccagaagcgttaatgtctggcttctgataaagcgggccatgttaagggcggttttttcctgtttggtcactgatgcctccgtgtaagggggatttctgttcatgggggtaatgataccgatgaaacgagagaggatgctcacgatacgggttactgatgatgaacatgcccggttactggaacgttgtgagggtaaacaactggcggtatggatgcggcgggaccagagaaaaatcactcagggtcaatgccagcgcttcgttaatacagatgtaggtgttccacagggtagccagcagcatcctgcgatgcagatccggaacataatggtgcagggcgctgacttccgcgtttccagactttacgaaacacggaaaccgaagaccattcatgttgttgctcaggtcgcagacgttttgcagcagcagtcgcttcacgttcgctcgcgtatcggtgattcattctgctaaccagtaaggcaaccccgccagcctagccgggtcctcaacgacaggagcacgatcatgctagtcatgccccgcgcccaccggaaggagctgactgggttgaaggctctcaagggcatcggtcgagatcccggtgcctaatgagtgagctaacttacattaattgcgttgcgctcactgcccgctttccagtcgggaaacctgtcgtgccagctgcattaatgaatcggccaacgcgcggggagaggcggtttgcgtattgggcgccagggtggtttttcttttcaccagtgagacgggcaacagctgattgcccttcaccgcctggccctgagagagttgcagcaagcggtccacgctggtttgccccagcaggcgaaaatcctgtttgatggtggttaacggcgggatataacatgagctgtcttcggtatcgtcgtatcccactaccgagatgtccgcaccaacgcgcagcccggactcggtaatggcgcgcattgcgcccagcgccatctgatcgttggcaaccagcatcgcagtgggaacgatgccctcattcagcatttgcatggtttgttgaaaaccggacatggcactccagtcgccttcccgttccgctatcggctgaatttgattgcgagtgagatatttatgccagccagccagacgcagacgcgccgagacagaacttaatgggcccgctaacagcgcgatttgctggtgacccaatgcgaccagatgctccacgcccagtcgcgtaccgtcttcatgggagaaaataatactgttgatgggtgtctggtcagagacatcaagaaataacgccggaacattagtgcaggcagcttccacagcaatggcatcctggtcatccagcggatagttaatgatcagcccactgacgcgttgcgcgagaagattgtgcaccgccgctttacaggcttcgacgccgcttcgttctaccatcgacaccaccacgctggcacccagttgatcggcgcgagatttaatcgccgcgacaatttgcgacggcgcgtgcagggccagactggaggtggcaacgccaatcagcaacgactgtttgcccgccagttgttgtgccacgcggttgggaatgtaattcagctccgccatcgccgcttccactttttcccgcgttttcgcagaaacgtggctggcctggttcaccacgcgggaaacggtctgataagagacaccggcatactctgcgacatcgtataacgttactggtttcacattcaccaccctgaattgactctcttccgggcgctatcatgccataccgcgaaaggttttgcgccattcgatggtgtccgggatctcgacgctctcccttatgcgactcctgcattaggaagcagcccagtagtaggttgaggccgttgagcaccgccgccgcaaggaatggtgcatgcaaggagatggcgcccaacagtcccccggccacggggcctgccaccatacccacgccgaaacaagcgctcatgagcccgaagtggcgagcccgatcttccccatcggtgatgtcggcgatataggcgccagcaaccgcacctgtggcgccggtgatgccggccacgatgcgtccggcgtagaggatcgagatcgatctcgatcccgcgaaattaatacgactcactataggggaattgtgagcggataacaattcccctctagaaataattttgtttaactttaagaaggagatatacatatgcaccaccaccaccaccacggctatggccgcaaaaaacgccgccagcgccgccgcggctatccgtatgatgtgccggattatgccccatgccagccgatgaaacgtctgaccctgggcaacgatatcatggcggcggcggttcggatgaacatccagatgctgctggaggcggccgactatctggagcggcgggagagagaagctgaacatggttatgcctccatgttaccatacccgaaaaagaaacgtaaagtggggctcgagcccggggagaagccttataagtgccccgaatgtggaaagagtttctctactaagaatagcctgaccgagcaccagcgcactcacaccggggagaagccctataaatgccctgaatgcgggaaatctttctctcaatcaggccacctcacagaacaccagcggacacacaccggggagaagccctataaatgccctgaatgcgggaaatctttctctcaatcaggccacctcacagaacaccagcggacacacaccggggaaaagccctacaagtgtcctgagtgcggaaagtctttctccactagcggttcattagtaagacaccagaggacacacaccggggagaagccctataaatgtccagaatgtggaaagtcctttagcacgtcagggaacttagtaagacaccagcgaactcataccggggaaaaaccctacaagtgccctgagtgtggaaagtcatttagtcgctccgaccacctgaccaaccatcagcggactcacaccggtgagcagaaactcatctctgaagaagatctggaacaaaagttgatttcagaagaagatctggaacagaagctcatctctgaggaagatctgtaagcggccgcactcgagcaccaccaccaccaccaccaccactaattgattaatacctaggctgctaaacaaagcccgaaaggaagctgagttggctgctgccaccgctgagcaataactagcataaccccttggggcctctaaacgggtcttgaggggttttttgctgaaaggaggaactatatccggat

SEQ ID NO: 316 - DNA, 5896 bp, Artificial Sequence
  synthetic construct
tggcgaatgggacgcgccctgtagcggcgcattaagcgcggcgggtgtggtggttacgcgcagcgtgaccgctacacttgccagcgccctagcgcccgctcctttcgctttcttcccttcctttctcgccacgttcgccggctttccccgtcaagctctaaatcgggggctccctttagggttccgatttagtgctttacggcacctcgaccccaaaaaacttgattagggtgatggttcacgtagtgggccatcgccctgatagacggtttttcgccctttgacgttggagtccacgttctttaatagtggactcttgttccaaactggaacaacactcaaccctatctcggtctattcttttgatttataagggattttgccgatttcggcctattggttaaaaaatgagctgatttaacaaaaatttaacgcgaattttaacaaaatattaacgtttacaatttcaggtggcacttttcggggaaatgtgcgcggaacccctatttgtttatttttctaaatacattcaaatatgtatccgctcatgaattaattcttagaaaaactcatcgagcatcaaatgaaactgcaatttattcatatcaggattatcaataccatatttttgaaaaagccgtttctgtaatgaaggagaaaactcaccgaggcagttccataggatggcaagatcctggtatcggtctgcgattccgactcgtccaacatcaatacaacctattaatttcccctcgtcaaaaataaggttatcaagtgagaaatcaccatgagtgacgactgaatccggtgagaatggcaaaagtttatgcatttctttccagacttgttcaacaggccagccattacgctcgtcatcaaaatcactcgcatcaaccaaaccgttattcattcgtgattgcgcctgagcgagacgaaatacgcgatcgctgttaaaaggacaattacaaacaggaatcgaatgcaaccggcgcaggaacactgccagcgcatcaacaatattttcacctgaatcaggatattcttctaatacctggaatgctgttttcccggggatcgcagtggtgagtaaccatgcatcatcaggagtacggataaaatgcttgatggtcggaagaggcataaattccgtcagccagtttagtctgaccatctcatctgtaacatcattggcaacgctacctttgccatgtttcagaaacaactctggcgcatcgggcttcccatacaatcgatagattgtcgcacctgattgcccgacattatcgcgagcccatttatacccatataaatcagcatccatgttggaatttaatcgcggcctagagcaagacgtttcccgttgaatatggctcataacaccccttgtattactgtttatgtaagcagacagttttattgttcatgaccaaaatcccttaacgtgagttttcgttccactgagcgtcagaccccgtagaaaagatcaaaggatcttcttgagatcctttttttctgcgcgtaatctgctgcttgcaaacaaaaaaaccaccgctaccagcggtggtttgtttgccggatcaagagctaccaactctttttccgaaggtaactggcttcagcagagcgcagataccaaatactgtccttctagtgtagccgtagttaggccaccacttcaagaactctgtagcaccgcctacatacctcgctctgctaatcctgttaccagtggctgctgccagtggcgataagtcgtgtcttaccgggttggactcaagacgatagttaccggataaggcgcagcggtcgggctgaacggggggttcgtgcacacagcccagcttggagcgaacgacctacaccgaactgagatacctacagcgtgagctatgagaaagcgccacgcttcccgaagggagaaaggcggacaggtatccggtaagcggcagggtcggaacaggagagcgcacgagggagcttccagggggaaacgcctggtatctttatagtcctgtcgggtttcgccacctctgacttgagcgtcgatttttgtgatgctcgtcaggggggcggagcctatggaaaaacgccagcaacgcggcctttttacggttcctggccttttgctggccttttgctcacatgttctttcctgcgttatcccctgattctgtggataaccgtattaccgcctttgagtgagctgataccgctcgccgcagccgaacgaccgagcgcagcgagtcagtgagcgaggaagcggaagagcgcctgatgcggtattttctccttacgcatctgtgcggtatttcacaccgcatatatggtgcactctcagtacaatctgctctgatgccgcatagttaagccagtatacactccgctatcgctacgtgactgggtcatggctgcgccccgacacccgccaacacccgctgacgcgccctgacgggcttgtctgctcccggcatccgcttacagacaagctgtgaccgtctccgggagctgcatgtgtcagaggttttcaccgtcatcaccgaaacgcgcgaggcagctgcggtaaagctcatcagcgtggtcgtgaagcgattcacagatgtctgcctgttcatccgcgtccagctcgttgagtttctccagaagcgttaatgtctggcttctgataaagcgggccatgttaagggcggttttttcctgtttggtcactgatgcctccgtgtaagggggatttctgttcatgggggtaatgataccgatgaaacgagagaggatgctcacgatacgggttactgatgatgaacatgcccggttactggaacgttgtgagggtaaacaactggcggtatggatgcggcgggaccagagaaaaatcactcagggtcaatgccagcgcttcgttaatacagatgtaggtgttccacagggtagccagcagcatcctgcgatgcagatccggaacataatggtgcagggcgctgacttccgcgtttccagactttacgaaacacggaaaccgaagaccattcatgttgttgctcaggtcgcagacgttttgcagcagcagtcgcttcacgttcgctcgcgtatcggtgattcattctgctaaccagtaaggcaaccccgccagcctagccgggtcctcaacgacaggagcacgatcatgctagtcatgccccgcgcccaccggaaggagctgactgggttgaaggctctcaagggcatcggtcgagatcccggtgcctaatgagtgagctaacttacattaattgcgttgcgctcactgcccgctttccagtcgggaaacctgtcgtgccagctgcattaatgaatcggccaacgcgcggggagaggcggtttgcgtattgggcgccagggtggtttttcttttcaccagtgagacgggcaacagctgattgcccttcaccgcctggccctgagagagttgcagcaagcggtccacgctggtttgccccagcaggcgaaaatcctgtttgatggtggttaacggcgggatataacatgagctgtcttcggtatcgtcgtatcccactaccgagatgtccgcaccaacgcgcagcccggactcggtaatggcgcgcattgcgcccagcgccatctgatcgttggcaaccagcatcgcagtgggaacgatgccctcattcagcatttgcatggtttgttgaaaaccggacatggcactccagtcgccttcccgttccgctatcggctgaatttgattgcgagtgagatatttatgccagccagccagacgcagacgcgccgagacagaacttaatgggcccgctaacagcgcgatttgctggtgacccaatgcgaccagatgctccacgcccagtcgcgtaccgtcttcatgggagaaaataatactgttgatgggtgtctggtcagagacatcaagaaataacgccggaacattagtgcaggcagcttccacagcaatggcatcctggtcatccagcggatagttaatgatcagcccactgacgcgttgcgcgagaagattgtgcaccgccgctttacaggcttcgacgccgcttcgttctaccatcgacaccaccacgctggcacccagttgatcggcgcgagatttaatcgccgcgacaatttgcgacggcgcgtgcagggccagactggaggtggcaacgccaatcagcaacgactgtttgcccgccagttgttgtgccacgcggttgggaatgtaattcagctccgccatcgccgcttccactttttcccgcgttttcgcagaaacgtggctggcctggttcaccacgcgggaaacggtctgataagagacaccggcatactctgcgacatcgtataacgttactggtttcacattcaccaccctgaattgactctcttccgggcgctatcatgccataccgcgaaaggttttgcgccattcgatggtgtccgggatctcgacgctctcccttatgcgactcctgcattaggaagcagcccagtagtaggttgaggccgttgagcaccgccgccgcaaggaatggtgcatgcaaggagatggcgcccaacagtcccccggccacggggcctgccaccatacccacgccgaaacaagcgctcatgagcccgaagtggcgagcccgatcttccccatcggtgatgtcggcgatataggcgccagcaaccgcacctgtggcgccggtgatgccggccacgatgcgtccggcgtagaggatcgagatcgatctcgatcccgcgaaattaatacgactcactataggggaattgtgagcggataacaattcccctctagaaataattttgtttaactttaagaaggagatatacatatgcaccaccaccaccaccacggctatggccgcaaaaaacgccgccagcgccgccgcggctatccgtatgatgtgccggattatgccccatgccagccgatgaaacgtctgaccctgggcaacgatatcatggcggcggcggttcggatgaacatccagatgctgctggaggcggccgactatctggagcggcgggagagagaagctgaacatggttatgcctccatgttaccatacccgaaaaagaaacgtaaagtggggctcgagcccggggaaaagccctataagtgtcccgaatgcggcaagagttttagtactactggcgcactcacagaacaccagcgcactcacaccggggaaaaaccgtacaagtgtcctgagtgcgggaagagtttctccgatccgggccacttagtaagacatcagaggacacataccggggaaaagccctacaagtgccctgagtgtgggaagtccttttcttcaagacgcacgtgccgcgctcaccagcggacacataccggggagaagccatacaagtgccctgaatgtggcaagtccttttcaagagccgataacctgacagaacaccaaaggacgcataccggggaaaaaccgtacaagtgtcctgagtgcgggaagagtttctccgatccgggccacttagtaagacatcagaggacacataccggggaaaagccctacaagtgccctgagtgtgggaagtccttttcttcaagacgcacgtgccgcgctcaccagcggacacataccggtgagcagaaactcatctctgaagaagatctggaacaaaagttgatttcagaagaagatctggaacagaagctcatctctgaggaagatctgtaagcggccgcactcgagcaccaccaccaccaccaccaccactaattgattaatacctaggctgctaaacaaagcccgaaaggaagctgagttggctgctgccaccgctgagcaataactagcataaccccttggggcctctaaacgggtcttgaggggttttttgctgaaaggaggaactatatccggat

SEQ ID NO: 317 - DNA, 5896 bp, Artificial Sequence
  synthetic construct
tggcgaatgggacgcgccctgtagcggcgcattaagcgcggcgggtgtggtggttacgcgcagcgtgaccgctacacttgccagcgccctagcgcccgctcctttcgctttcttcccttcctttctcgccacgttcgccggctttccccgtcaagctctaaatcgggggctccctttagggttccgatttagtgctttacggcacctcgaccccaaaaaacttgattagggtgatggttcacgtagtgggccatcgccctgatagacggtttttcgccctttgacgttggagtccacgttctttaatagtggactcttgttccaaactggaacaacactcaaccctatctcggtctattcttttgatttataagggattttgccgatttcggcctattggttaaaaaatgagctgatttaacaaaaatttaacgcgaattttaacaaaatattaacgtttacaatttcaggtggcacttttcggggaaatgtgcgcggaacccctatttgtttatttttctaaatacattcaaatatgtatccgctcatgaattaattcttagaaaaactcatcgagcatcaaatgaaactgcaatttattcatatcaggattatcaataccatatttttgaaaaagccgtttctgtaatgaaggagaaaactcaccgaggcagttccataggatggcaagatcctggtatcggtctgcgattccgactcgtccaacatcaatacaacctattaatttcccctcgtcaaaaataaggttatcaagtgagaaatcaccatgagtgacgactgaatccggtgagaatggcaaaagtttatgcatttctttccagacttgttcaacaggccagccattacgctcgtcatcaaaatcactcgcatcaaccaaaccgttattcattcgtgattgcgcctgagcgagacgaaatacgcgatcgctgttaaaaggacaattacaaacaggaatcgaatgcaaccggcgcaggaacactgccagcgcatcaacaatattttcacctgaatcaggatattcttctaatacctggaatgctgttttcccggggatcgcagtggtgagtaaccatgcatcatcaggagtacggataaaatgcttgatggtcggaagaggcataaattccgtcagccagtttagtctgaccatctcatctgtaacatcattggcaacgctacctttgccatgtttcagaaacaactctggcgcatcgggcttcccatacaatcgatagattgtcgcacctgattgcccgacattatcgcgagcccatttatacccatataaatcagcatccatgttggaatttaatcgcggcctagagcaagacgtttcccgttgaatatggctcataacaccccttgtattactgtttatgtaagcagacagttttattgttcatgaccaaaatcccttaacgtgagttttcgttccactgagcgtcagaccccgtagaaaagatcaaaggatcttcttgagatcctttttttctgcgcgtaatctgctgcttgcaaacaaaaaaaccaccgctaccagcggtggtttgtttgccggatcaagagctaccaactctttttccgaaggtaactggcttcagcagagcgcagataccaaatactgtccttctagtgtagccgtagttaggccaccacttcaagaactctgtagcaccgcctacatacctcgctctgctaatcctgttaccagtggctgctgccagtggcgataagtcgtgtcttaccgggttggactcaagacgatagttaccggataaggcgcagcggtcgggctgaacggggggttcgtgcacacagcccagcttggagcgaacgacctacaccgaactgagatacctacagcgtgagctatgagaaagcgccacgcttcccgaagggagaaaggcggacaggtatccggtaagcggcagggtcggaacaggagagcgcacgagggagcttccagggggaaacgcctggtatctttatagtcctgtcgggtttcgccacctctgacttgagcgtcgatttttgtgatgctcgtcaggggggcggagcctatggaaaaacgccagcaacgcggcctttttacggttcctggccttttgctggccttttgctcacatgttctttcctgcgttatcccctgattctgtggataaccgtattaccgcctttgagtgagctgataccgctcgccgcagccgaacgaccgagcgcagcgagtcagtgagcgaggaagcggaagagcgcctgatgcggtattttctccttacgcatctgtgcggtatttcacaccgcatatatggtgcactctcagtacaatctgctctgatgccgcatagttaagccagtatacactccgctatcgctacgtgactgggtcatggctgcgccccgacacccgccaacacccgctgacgcgccctgacgggcttgtctgctcccggcatccgcttacagacaagctgtgaccgtctccgggagctgcatgtgtcagaggttttcaccgtcatcaccgaaacgcgcgaggcagctgcggtaaagctcatcagcgtggtcgtgaagcgattcacagatgtctgcctgttcatccgcgtccagctcgttgagtttctccagaagcgttaatgtctggcttctgataaagcgggccatgttaagggcggttttttcctgtttggtcactgatgcctccgtgtaagggggatttctgttcatgggggtaatgataccgatgaaacgagagaggatgctcacgatacgggttactgatgatgaacatgcccggttactggaacgttgtgagggtaaacaactggcggtatggatgcggcgggaccagagaaaaatcactcagggtcaatgccagcgcttcgttaatacagatgtaggtgttccacagggtagccagcagcatcctgcgatgcagatccggaacataatggtgcagggcgctgacttccgcgtttccagactttacgaaacacggaaaccgaagaccattcatgttgttgctcaggtcgcagacgttttgcagcagcagtcgcttcacgttcgctcgcgtatcggtgattcattctgctaaccagtaaggcaaccccgccagcctagccgggtcctcaacgacaggagcacgatcatgctagtcatgccccgcgcccaccggaaggagctgactgggttgaaggctctcaagggcatcggtcgagatcccggtgcctaatgagtgagctaacttacattaattgcgttgcgctcactgcccgctttccagtcgggaaacctgtcgtgccagctgcattaatgaatcggccaacgcgcggggagaggcggtttgcgtattgggcgccagggtggtttttcttttcaccagtgagacgggcaacagctgattgcccttcaccgcctggccctgagagagttgcagcaagcggtccacgctggtttgccccagcaggcgaaaatcctgtttgatggtggttaacggcgggatataacatgagctgtcttcggtatcgtcgtatcccactaccgagatgtccgcaccaacgcgcagcccggactcggtaatggcgcgcattgcgcccagcgccatctgatcgttggcaaccagcatcgcagtgggaacgatgccctcattcagcatttgcatggtttgttgaaaaccggacatggcactccagtcgccttcccgttccgctatcggctgaatttgattgcgagtgagatatttatgccagccagccagacgcagacgcgccgagacagaacttaatgggcccgctaacagcgcgatttgctggtgacccaatgcgaccagatgctccacgcccagtcgcgtaccgtcttcatgggagaaaataatactgttgatgggtgtctggtcagagacatcaagaaataacgccggaacattagtgcaggcagcttccacagcaatggcatcctggtcatccagcggatagttaatgatcagcccactgacgcgttgcgcgagaagattgtgcaccgccgctttacaggcttcgacgccgcttcgttctaccatcgacaccaccacgctggcacccagttgatcggcgcgagatttaatcgccgcgacaatttgcgacggcgcgtgcagggccagactggaggtggcaacgccaatcagcaacgactgtttgcccgccagttgttgtgccacgcggttgggaatgtaattcagctccgccatcgccgcttccactttttcccgcgttttcgcagaaacgtggctggcctggttcaccacgcgggaaacggtctgataagagacaccggcatactctgcgacatcgtataacgttactggtttcacattcaccaccctgaattgactctcttccgggcgctatcatgccataccgcgaaaggttttgcgccattcgatggtgtccgggatctcgacgctctcccttatgcgactcctgcattaggaagcagcccagtagtaggttgaggccgttgagcaccgccgccgcaaggaatggtgcatgcaaggagatggcgcccaacagtcccccggccacggggcctgccaccatacccacgccgaaacaagcgctcatgagcccgaagtggcgagcccgatcttccccatcggtgatgtcggcgatataggcgccagcaaccgcacctgtggcgccggtgatgccggccacgatgcgtccggcgtagaggatcgagatcgatctcgatcccgcgaaattaatacgactcactataggggaattgtgagcggataacaattcccctctagaaataattttgtttaactttaagaaggagatatacatatgcaccaccaccaccaccacggctatggccgcaaaaaacgccgccagcgccgccgcggctatccgtatgatgtgccggattatgccccatgccagccgatgaaacgtctgaccctgggcaacgatatcatggcggcggcggttcggatgaacatccagatgctgctggaggcggccgactatctggagcggcgggagagagaagctgaacatggttatgcctccatgttaccatacccgaaaaagaaacgtaaagtggggctcgagcccggggaaaagccctataagtgtcccgaatgcggcaagagttttagtactactggcgcactcacagaacaccagcgcactcacaccggggagaagccttataagtgccccgaatgtggaaagagtttctctactaagaatagcctgaccgagcaccagcgcactcacaccggggaaaagccttacaaatgccccgaatgtgggaagagtttcagccggtctgataagctgaccgaacaccagagaactcataccggggaaaagccttacaaatgccccgaatgtgggaagagtttcagccggtctgataagctgaccgaacaccagagaactcataccggggagaagccatataaatgtcccgagtgtggcaagtccttttctagatcagataatttagtaagacatcagagaacgcacaccggggaaaagccttacaaatgccccgaatgtgggaagagtttcagccggtctgataagctgaccgaacaccagagaactcataccggtgagcagaaactcatctctgaagaagatctggaacaaaagttgatttcagaagaagatctggaacagaagctcatctctgaggaagatctgtaagcggccgcactcgagcaccaccaccaccaccaccaccactaattgattaatacctaggctgctaaacaaagcccgaaaggaagctgagttggctgctgccaccgctgagcaataactagcataaccccttggggcctctaaacgggtcttgaggggttttttgctgaaaggaggaactatatccggat

SEQ ID NO: 318 - DNA, 5896 bp, Artificial Sequence
  synthetic construct
tggcgaatgggacgcgccctgtagcggcgcattaagcgcggcgggtgtggtggttacgcgcagcgtgaccgctacacttgccagcgccctagcgcccgctcctttcgctttcttcccttcctttctcgccacgttcgccggctttccccgtcaagctctaaatcgggggctccctttagggttccgatttagtgctttacggcacctcgaccccaaaaaacttgattagggtgatggttcacgtagtgggccatcgccctgatagacggtttttcgccctttgacgttggagtccacgttctttaatagtggactcttgttccaaactggaacaacactcaaccctatctcggtctattcttttgatttataagggattttgccgatttcggcctattggttaaaaaatgagctgatttaacaaaaatttaacgcgaattttaacaaaatattaacgtttacaatttcaggtggcacttttcggggaaatgtgcgcggaacccctatttgtttatttttctaaatacattcaaatatgtatccgctcatgaattaattcttagaaaaactcatcgagcatcaaatgaaactgcaatttattcatatcaggattatcaataccatatttttgaaaaagccgtttctgtaatgaaggagaaaactcaccgaggcagttccataggatggcaagatcctggtatcggtctgcgattccgactcgtccaacatcaatacaacctattaatttcccctcgtcaaaaataaggttatcaagtgagaaatcaccatgagtgacgactgaatccggtgagaatggcaaaagtttatgcatttctttccagacttgttcaacaggccagccattacgctcgtcatcaaaatcactcgcatcaaccaaaccgttattcattcgtgattgcgcctgagcgagacgaaatacgcgatcgctgttaaaaggacaattacaaacaggaatcgaatgcaaccggcgcaggaacactgccagcgcatcaacaatattttcacctgaatcaggatattcttctaatacctggaatgctgttttcccggggatcgcagtggtgagtaaccatgcatcatcaggagtacggataaaatgcttgatggtcggaagaggcataaattccgtcagccagtttagtctgaccatctcatctgtaacatcattggcaacgctacctttgccatgtttcagaaacaactctggcgcatcgggcttcccatacaatcgatagattgtcgcacctgattgcccgacattatcgcgagcccatttatacccatataaatcagcatccatgttggaatttaatcgcggcctagagcaagacgtttcccgttgaatatggctcataacaccccttgtattactgtttatgtaagcagacagttttattgttcatgaccaaaatcccttaacgtgagttttcgttccactgagcgtcagaccccgtagaaaagatcaaaggatcttcttgagatcctttttttctgcgcgtaatctgctgcttgcaaacaaaaaaaccaccgctaccagcggtggtttgtttgccggatcaagagctaccaactctttttccgaaggtaactggcttcagcagagcgcagataccaaatactgtccttctagtgtagccgtagttaggccaccacttcaagaactctgtagcaccgcctacatacctcgctctgctaatcctgttaccagtggctgctgccagtggcgataagtcgtgtcttaccgggttggactcaagacgatagttaccggataaggcgcagcggtcgggctgaacggggggttcgtgcacacagcccagcttggagcgaacgacctacaccgaactgagatacctacagcgtgagctatgagaaagcgccacgcttcccgaagggagaaaggcggacaggtatccggtaagcggcagggtcggaacaggagagcgcacgagggagcttccagggggaaacgcctggtatctttatagtcctgtcgggtttcgccacctctgacttgagcgtcgatttttgtgatgctcgtcaggggggcggagcctatggaaaaacgccagcaacgcggcctttttacggttcctggccttttgctggccttttgctcacatgttctttcctgcgttatcccctgattctgtggataaccgtattaccgcctttgagtgagctgataccgctcgccgcagccgaacgaccgagcgcagcgagtcagtgagcgaggaagcggaagagcgcctgatgcggtattttctccttacgcatctgtgcggtatttcacaccgcatatatggtgcactctcagtacaatctgctctgatgccgcatagttaagccagtatacactccgctatcgctacgtgactgggtcatggctgcgccccgacacccgccaacacccgctgacgcgccctgacgggcttgtctgctcccggcatccgcttacagacaagctgtgaccgtctccgggagctgcatgtgtcagaggttttcaccgtcatcaccgaaacgcgcgaggcagctgcggtaaagctcatcagcgtggtcgtgaagcgattcacagatgtctgcctgttcatccgcgtccagctcgttgagtttctccagaagcgttaatgtctggcttctgataaagcgggccatgttaagggcggttttttcctgtttggtcactgatgcctccgtgtaagggggatttctgttcatgggggtaatgataccgatgaaacgagagaggatgctcacgatacgggttactgatgatgaacatgcccggttactggaacgttgtgagggtaaacaactggcggtatggatgcggcgggaccagagaaaaatcactcagggtcaatgccagcgcttcgttaatacagatgtaggtgttccacagggtagccagcagcatcctgcgatgcagatccggaacataatggtgcagggcgctgacttccgcgtttccagactttacgaaacacggaaaccgaagaccattcatgttgttgctcaggtcgcagacgttttgcagcagcagtcgcttcacgttcgctcgcgtatcggtgattcattctgctaaccagtaaggcaaccccgccagcctagccgggtcctcaacgacaggagcacgatcatgctagtcatgccccgcgcccaccggaaggagctgactgggttgaaggctctcaagggcatcggtcgagatcccggtgcctaatgagtgagctaacttacattaattgcgttgcgctcactgcccgctttccagtcgggaaacctgtcgtgccagctgcattaatgaatcggccaacgcgcggggagaggcggtttgcgtattgggcgccagggtggtttttcttttcaccagtgagacgggcaacagctgattgcccttcaccgcctggccctgagagagttgcagcaagcggtccacgctggtttgccccagcaggcgaaaatcctgtttgatggtggttaacggcgggatataacatgagctgtcttcggtatcgtcgtatcccactaccgagatgtccgcaccaacgcgcagcccggactcggtaatggcgcgcattgcgcccagcgccatctgatcgttggcaaccagcatcgcagtgggaacgatgccctcattcagcatttgcatggtttgttgaaaaccggacatggcactccagtcgccttcccgttccgctatcggctgaatttgattgcgagtgagatatttatgccagccagccagacgcagacgcgccgagacagaacttaatgggcccgctaacagcgcgatttgctggtgacccaatgcgaccagatgctccacgcccagtcgcgtaccgtcttcatgggagaaaataatactgttgatgggtgtctggtcagagacatcaagaaataacgccggaacattagtgcaggcagcttccacagcaatggcatcctggtcatccagcggatagttaatgatcagcccactgacgcgttgcgcgagaagattgtgcaccgccgctttacaggcttcgacgccgcttcgttctaccatcgacaccaccacgctggcacccagttgatcggcgcgagatttaatcgccgcgacaatttgcgacggcgcgtgcagggccagactggaggtggcaacgccaatcagcaacgactgtttgcccgccagttgttgtgccacgcggttgggaatgtaattcagctccgccatcgccgcttccactttttcccgcgttttcgcagaaacgtggctggcctggttcaccacgcgggaaacggtctgataagagacaccggcatactctgcgacatcgtataacgttactggtttcacattcaccaccctgaattgactctcttccgggcgctatcatgccataccgcgaaaggttttgcgccattcgatggtgtccgggatctcgacgctctcccttatgcgactcctgcattaggaagcagcccagtagtaggttgaggccgttgagcaccgccgccgcaaggaatggtgcatgcaaggagatggcgcccaacagtcccccggccacggggcctgccaccatacccacgccgaaacaagcgctcatgagcccgaagtggcgagcccgatcttccccatcggtgatgtcggcgatataggcgccagcaaccgcacctgtggcgccggtgatgccggccacgatgcgtccggcgtagaggatcgagatcgatctcgatcccgcgaaattaatacgactcactataggggaattgtgagcggataacaattcccctctagaaataattttgtttaactttaagaaggagatatacatatgcaccaccaccaccaccacggctatggccgcaaaaaacgccgccagcgccgccgcggctatccgtatgatgtgccggattatgccccatgccagccgatgaaacgtctgaccctgggcaacgatatcatggcggcggcggttcggatgaacatccagatgctgctggaggcggccgactatctggagcggcgggagagagaagctgaacatggttatgcctccatgttaccatacccgaaaaagaaacgtaaagtggggctcgagcccggggagaaaccttataaatgcccagaatgcgggaaatcgttcagtcaaagagcacatttagaaagacatcaacggacccacaccggggagaaaccatacaagtgtccagagtgcgggaaaagctttagtacaagcggtgagttagtaagacaccaacgaacacacaccggggagaaaccatacaagtgtccagagtgcgggaaaagctttagtacaagcggtgagttagtaagacaccaacgaacacacaccggggagaaaccatacaaatgccccgagtgtggaaagtcatttagtgatccaggcgcattagtaagacatcagcggacacataccggggagaaaccatacaaatgccccgagtgtggaaagtcatttagtgatccaggcgcattagtaagacatcagcggacacataccggggaaaagccctataagtgtcccgaatgcggcaagagttttagtactactggcgcactcacagaacaccagcgcactcacaccggtgagcagaaactcatctctgaagaagatctggaacaaaagttgatttcagaagaagatctggaacagaagctcatctctgaggaagatctgtaagcggccgcactcgagcaccaccaccaccaccaccaccactaattgattaatacctaggctgctaaacaaagcccgaaaggaagctgagttggctgctgccaccgctgagcaataactagcataaccccttggggcctctaaacgggtcttgaggggttttttgctgaaaggaggaactatatccggat

SEQ ID NO: 319 - DNA, 5896 bp, Artificial Sequence
  synthetic construct
tggcgaatgggacgcgccctgtagcggcgcattaagcgcggcgggtgtggtggttacgcgcagcgtgaccgctacacttgccagcgccctagcgcccgctcctttcgctttcttcccttcctttctcgccacgttcgccggctttccccgtcaagctctaaatcgggggctccctttagggttccgatttagtgctttacggcacctcgaccccaaaaaacttgattagggtgatggttcacgtagtgggccatcgccctgatagacggtttttcgccctttgacgttggagtccacgttctttaatagtggactcttgttccaaactggaacaacactcaaccctatctcggtctattcttttgatttataagggattttgccgatttcggcctattggttaaaaaatgagctgatttaacaaaaatttaacgcgaattttaacaaaatattaacgtttacaatttcaggtggcacttttcggggaaatgtgcgcggaacccctatttgtttatttttctaaatacattcaaatatgtatccgctcatgaattaattcttagaaaaactcatcgagcatcaaatgaaactgcaatttattcatatcaggattatcaataccatatttttgaaaaagccgtttctgtaatgaaggagaaaactcaccgaggcagttccataggatggcaagatcctggtatcggtctgcgattccgactcgtccaacatcaatacaacctattaatttcccctcgtcaaaaataaggttatcaagtgagaaatcaccatgagtgacgactgaatccggtgagaatggcaaaagtttatgcatttctttccagacttgttcaacaggccagccattacgctcgtcatcaaaatcactcgcatcaaccaaaccgttattcattcgtgattgcgcctgagcgagacgaaatacgcgatcgctgttaaaaggacaattacaaacaggaatcgaatgcaaccggcgcaggaacactgccagcgcatcaacaatattttcacctgaatcaggatattcttctaatacctggaatgctgttttcccggggatcgcagtggtgagtaaccatgcatcatcaggagtacggataaaatgcttgatggtcggaagaggcataaattccgtcagccagtttagtctgaccatctcatctgtaacatcattggcaacgctacctttgccatgtttcagaaacaactctggcgcatcgggcttcccatacaatcgatagattgtcgcacctgattgcccgacattatcgcgagcccatttatacccatataaatcagcatccatgttggaatttaatcgcggcctagagcaagacgtttcccgttgaatatggctcataacaccccttgtattactgtttatgtaagcagacagttttattgttcatgaccaaaatcccttaacgtgagttttcgttccactgagcgtcagaccccgtagaaaagatcaaaggatcttcttgagatcctttttttctgcgcgtaatctgctgcttgcaaacaaaaaaaccaccgctaccagcggtggtttgtttgccggatcaagagctaccaactctttttccgaaggtaactggcttcagcagagcgcagataccaaatactgtccttctagtgtagccgtagttaggccaccacttcaagaactctgtagcaccgcctacatacctcgctctgctaatcctgttaccagtggctgctgccagtggcgataagtcgtgtcttaccgggttggactcaagacgatagttaccggataaggcgcagcggtcgggctgaacggggggttcgtgcacacagcccagcttggagcgaacgacctacaccgaactgagatacctacagcgtgagctatgagaaagcgccacgcttcccgaagggagaaaggcggacaggtatccggtaagcggcagggtcggaacaggagagcgcacgagggagcttccagggggaaacgcctggtatctttatagtcctgtcgggtttcgccacctctgacttgagcgtcgatttttgtgatgctcgtcaggggggcggagcctatggaaaaacgccagcaacgcggcctttttacggttcctggccttttgctggccttttgctcacatgttctttcctgcgttatcccctgattctgtggataaccgtattaccgcctttgagtgagctgataccgctcgccgcagccgaacgaccgagcgcagcgagtcagtgagcgaggaagcggaagagcgcctgatgcggtattttctccttacgcatctgtgcggtatttcacaccgcatatatggtgcactctcagtacaatctgctctgatgccgcatagttaagccagtatacactccgctatcgctacgtgactgggtcatggctgcgccccgacacccgccaacacccgctgacgcgccctgacgggcttgtctgctcccggcatccgcttacagacaagctgtgaccgtctccgggagctgcatgtgtcagaggttttcaccgtcatcaccgaaacgcgcgaggcagctgcggtaaagctcatcagcgtggtcgtgaagcgattcacagatgtctgcctgttcatccgcgtccagctcgttgagtttctccagaagcgttaatgtctggcttctgataaagcgggccatgttaagggcggttttttcctgtttggtcactgatgcctccgtgtaagggggatttctgttcatgggggtaatgataccgatgaaacgagagaggatgctcacgatacgggttactgatgatgaacatgcccggttactggaacgttgtgagggtaaacaactggcggtatggatgcggcgggaccagagaaaaatcactcagggtcaatgccagcgcttcgttaatacagatgtaggtgttccacagggtagccagcagcatcctgcgatgcagatccggaacataatggtgcagggcgctgacttccgcgtttccagactttacgaaacacggaaaccgaagaccattcatgttgttgctcaggtcgcagacgttttgcagcagcagtcgcttcacgttcgctcgcgtatcggtgattcattctgctaaccagtaaggcaaccccgccagcctagccgggtcctcaacgacaggagcacgatcatgctagtcatgccccgcgcccaccggaaggagctgactgggttgaaggctctcaagggcatcggtcgagatcccggtgcctaatgagtgagctaacttacattaattgcgttgcgctcactgcccgctttccagtcgggaaacctgtcgtgccagctgcattaatgaatcggccaacgcgcggggagaggcggtttgcgtattgggcgccagggtggtttttcttttcaccagtgagacgggcaacagctgattgcccttcaccgcctggccctgagagagttgcagcaagcggtccacgctggtttgccccagcaggcgaaaatcctgtttgatggtggttaacggcgggatataacatgagctgtcttcggtatcgtcgtatcccactaccgagatgtccgcaccaacgcgcagcccggactcggtaatggcgcgcattgcgcccagcgccatctgatcgttggcaaccagcatcgcagtgggaacgatgccctcattcagcatttgcatggtttgttgaaaaccggacatggcactccagtcgccttcccgttccgctatcggctgaatttgattgcgagtgagatatttatgccagccagccagacgcagacgcgccgagacagaacttaatgggcccgctaacagcgcgatttgctggtgacccaatgcgaccagatgctccacgcccagtcgcgtaccgtcttcatgggagaaaataatactgttgatgggtgtctggtcagagacatcaagaaataacgccggaacattagtgcaggcagcttccacagcaatggcatcctggtcatccagcggatagttaatgatcagcccactgacgcgttgcgcgagaagattgtgcaccgccgctttacaggcttcgacgccgcttcgttctaccatcgacaccaccacgctggcacccagttgatcggcgcgagatttaatcgccgcgacaatttgcgacggcgcgtgcagggccagactggaggtggcaacgccaatcagcaacgactgtttgcccgccagttgttgtgccacgcggttgggaatgtaattcagctccgccatcgccgcttccactttttcccgcgttttcgcagaaacgtggctggcctggttcaccacgcgggaaacggtctgataagagacaccggcatactctgcgacatcgtataacgttactggtttcacattcaccaccctgaattgactctcttccgggcgctatcatgccataccgcgaaaggttttgcgccattcgatggtgtccgggatctcgacgctctcccttatgcgactcctgcattaggaagcagcccagtagtaggttgaggccgttgagcaccgccgccgcaaggaatggtgcatgcaaggagatggcgcccaacagtcccccggccacggggcctgccaccatacccacgccgaaacaagcgctcatgagcccgaagtggcgagcccgatcttccccatcggtgatgtcggcgatataggcgccagcaaccgcacctgtggcgccggtgatgccggccacgatgcgtccggcgtagaggatcgagatcgatctcgatcccgcgaaattaatacgactcactataggggaattgtgagcggataacaattcccctctagaaataattttgtttaactttaagaaggagatatacatatgcaccaccaccaccaccacggctatggccgcaaaaaacgccgccagcgccgccgcggctatccgtatgatgtgccggattatgccccatgccagccgatgaaacgtctgaccctgggcaacgatatcatggcggcggcggttcggatgaacatccagatgctgctggaggcggccgactatctggagcggcgggagagagaagctgaacatggttatgcctccatgttaccatacccgaaaaagaaacgtaaagtggggctcgagcccggggagaagccctacaagtgtccagaatgcggaaagagtttctccagaagtgacaaattagtaagacaccagagaacccataccggggagaagccgtacaagtgccctgaatgtggtaagtcattttcgagaagtgatgaattagtaagacaccagcggactcataccggggaaaaaccgtacaagtgtcctgagtgcgggaagagtttctccgatccgggccacttagtaagacatcagaggacacataccggggagaagccatataaatgtcccgagtgtggcaagtccttttctagatcagataatttagtaagacatcagagaacgcacaccggggagaagccatacaagtgtcccgaatgcgggaagtcattctccagaagtgacgatttagtaagacatcagcgcacgcacaccggggagaaaccctataagtgtcccgaatgcgggaaatcattctctcatacagggcatctgctcgaacatcaaaggacgcacaccggtgagcagaaactcatctctgaagaagatctggaacaaaagttgatttcagaagaagatctggaacagaagctcatctctgaggaagatctgtaagcggccgcactcgagcaccaccaccaccaccaccaccactaattgattaatacctaggctgctaaacaaagcccgaaaggaagctgagttggctgctgccaccgctgagcaataactagcataaccccttggggcctctaaacgggtcttgaggggttttttgctgaaaggaggaactatatccggat
